United States Patent Application Publication US 2026/0137732 A1 - sequence listing, part 5

SEQ ID NO: 3 - DNA, 3047402 bp, Akkermansia muciniphila (residues 1,523,702-3,047,402 of 3,047,402)
  source 1..3047402: mol_type = genomic DNA
aaatcgaacaaatgtgttgcgtcaagaaaggctgcaaccatggtccggcccccatcccgcaggaaggcaactggacgcaatccaaggagatcacggatatttccggtctgacccacggcgtgggctggtgcgctccccagcagggcacctgcaagctgacgctgaacgtcaagaacggcatcgttgaggaagcccttgtagaaaccagcggctgctccggcatgacccactccgccgccatggccgcggaaatcctgcccggcaagaccgtgctggaagcgatgaacacggacctcgtgtgcgacgccatcaacaccgccatgcgcgaactgttcctgcagatcgtttacggccgcactcagagcgctttctccgaaggcggcctgcccatcggcgccggtcttgaagacctcggcaagggcctccgctcccagatcggcaccctgtacggcacccgcgccaagggcccccgctatctggaaatggccgaaggctacatcaccaagctggctctggacgaagacggcgaaatcatcggctatgagtttgtgcgcatgggcccgatgatggaaatgatcaagaagggcgtggacgccaacgaagccgtcgccaagtgcacgggcaactacggtcgtttcgacgaggccgccaagtacatcgatcctcgtcacgaatgagattgaattaaaaagagtatatcaacttcaagcactattaccatcatgcctcttttcgaatcctacgaccgccgcatcaagcagatcaatgaagccctggccaaatacggcatcggctccattgaagaagcggaacaactctgcctttccaagggcatcaacgttcgcgaaatcgtgaacggcatccagcccatcgcgtttgaaaacgccggctgggcctatgtggtgggcgccgccatcgccatcaagaagggctgcacgaaggctgcggacgccgctgaagccattggtgaaggcctccagtccttctgcattcccggttccgttgcggacgaccgcaaggtgggcctgggccacggcaacctggccgccatgctcctgcgcgatgaaacggaatgcttctgcttcctggccggccatgaatcctttgccgccgctgaaggcgccatcggcattgccaaatccgccaaccgcgtccgcaagcaggacctgcgcgtctgcctgaacggcctcggcaaggatgccgcgtacatcatctcccgcatcaacggcttcacgtacgtgcagaccaagttcgactatgccacgggcaagctgaacatcgtccaggagaaggctttctccaagggcccgaaggccgctgtgcgcgtgtacggctgcgacgacgtgcgcgaaggcgtggccgtcatgtggaatgaaggcgtggacgtctccatcaccgggaactccaccaaccccacccgcttccagcacccggtagccggcacctacaagaaggaatgcaacgagaagggcaagaagtacttctccgtggcttccggcggcggtacgggccgcaccctgcacccggacaacatggctgccggtcccgcctcctacggcatgaccgataccatgggccgcatgcactcggacgcccagttcgccggctcctcctccgtgcccgcccacgtggaaatgatgggccttatcggcatgggcaacaacccgatggtcggcgcttccgtagcggtggccgtggctgttgaagaagccgccaggcagaacgcctgagaacgctgttaaaattcacagagccgctttcccgatgaatggggaagcggctcttttttatggttgaaaggaaaaggcgaaaagcaaaaccggaactgttccggaagcttccgcttttgttcatatcagctcccgatgcggaaccttccgtcccggtccgtgcggggaggcaggccgcgagaaggcgcggatcttctggaaacaaccgtcggtctggccgcggctggcgtgacaacgcggatttccgtgcggccggaagctgcgggagcggcagatttcccgggttccgcaccgtgaacgggggcgggagcaggaacggcgccgacaatcagtttttgctgttcatgggccttgtaggcgcgttgcagggtaaagtccctccgttctccgggtttcagggaataatccgccttcttgctctccccggccttttgggccagaggctccacacgctgctgcaactgcgcggcggcgtccagcttcccggccacccactccggattccattccggagttgaacttttcagggactgaagcagctccgcggcttttttgccgctttccagggctgccttgtaatcgccttccttctccaggcgcgcggcgcgcgtcagggaaaggttggcttcgtaaaatgtgtctccgggaccgcccagggccgttgttgccgccaggagcatgcagagcagggagcagggtagaagatgccttttcatgattgttggcactataacatgcacggctgttttggaaaggcctttcttccggcatgtccgcatggagcaggggagggacgctacatagaggttccggaaaggaagcgggcgaccttcttctttttttacgaaggaagtccatcaaatttgcggctaagcatttgaaaaacctcctgcgaggtacggtcaggcttcctgatccaatcgtaaaaatttttcccattgaccggaatcctcacgttccccagtcgtttcagcttgatgtctatttgttcaaagcagcgtttattgcaacatgcccctccccctccaaggtcgggaaagagactcattacgatgcctattttggtttggagtatcttttgttcttttgctttcaatattctctgattgatggagatacgccattccttttctctgtcggtcagatttctcttgcgccatgtactaatgtagaatcggtattcatcctcattgatgatcctattattcagcgcttcgcccaaacatgccggattaagaggtttcgtgatatctttccgaacccggcggatggcatcgaaatgtttggatttgctgattcccgtaaatttctttacgcagcaattccctacaatcaggggattcctattaaggatatttctcatagcacaatgctctatgataaagtgaccgcaaatgcatgttcctccttcttctactgaatatgtttccacgtgttcccattcctgcaacgcggacggaaaccgcttggattcggacttagctaccagctctgagcagaattgatccatagatgaattattcatgattttattttctattcatgagacgtgcgtgaatgcaccctcactattcagggaaattttcaaaatgtatttccccttccatatatttccctcccgtctctttcagcaggcacgggtttcttccttattccaagagcatatcttccatttccgtatccggcacaacttgacggaaaggccggagtgccgtatgctggttgagacctgtatatgacccggaacgagccatcatccctcccagcgccgcagatggaggaagatcccagatacctgacggaacagattgtgacgtatctgggtaacaagcgttccctgcttcacttcctgggtacgggactggaacaggtgaaaagccgcctggggaaggacaggctgaaggccggggacctgttttccggtagcggcattgtagcccgtttcctgaaaaagcattcggaagagttgattgtcaatgatctggaagagtatagccgcatcgttaacacctgctacctgagcaatccggaggaagtggagaatctggagctggagaggcattacaggcgcctgctgcggtatatggaggagcacgagtccccggggttcatcacggagttgtacgcgcccaaaaatccagacagcatcacgccggaagaccgcgttttttatacgcgccgcaatgccgtgtacctggatacggcccggcagaccatcaacctgcttccggaagaggtaaggccctatttcatcgccccccttctggcggaggcttccgtgcatacgaacacatccggcgtgttcaagggattttacaaggacaggcacggcgtcggcaagttcggcggaacggccggcaacgctctttcccgcatcctgggggatatttcactgccgttccccgtgttttcccggtttaactgccggttttccatccactgccgtgacgccaatgaactggccgcggaattgccggagatggatgtggtgtacctggaccctccctacaatcagcatccgtacggttccaactatttcatgctgaacctgctgtcctcctatgagaagccggcggaaaccagccgtgtttccggcattcccgcggattggaaacgctccacgtacaacagccgccagcatgccccggcggccctgttccggctgctggaggaatgcccggccaagttcattctcctttcgtacagttcggagggcttcatcagttatgaggaaatgacgaatttccttggccgtatgggacatatcgtcacgctggaaaccccgtacgccacattccgcggcagccggaatttgaggaaccgcccgcagaacgtgacggagttcctgttcctggtggaacggttttaacgggcaggggaggtaacaccatgaaaacccatctggaacgcttcatccgttttctggccgcagagaaaggcttgagcgccgcctaccagctttccgtgaggcagacgctggaggaattcgcccggtttctgggtacggaagacgctgatctttcccatgtggacatcggcacgcttacggagttcctccggcatttgcaggcccgcggcatggcccgcagctccatgcgggtggaaatggtgcatttgcgcatctttttccgctggctggccgggatggggatgctggaaaaagacccctccgcctttctggaaatgccccggcaggggctgtcgctcccccatgtgctggatcagcaaaccgtttcaacactgcttgaaagtgttgacgttcaggatattcctctcggctgtagagacagagccctgctggagatgatttacgcctgcggcatgcgcgtgagtgaagtaatcagttgcaaattagagagtttagatatggatgatgcctttgtccgcgtgctggggaagggggagaaaacgcggctggtgcctgtgggtaggtccgccttggaggcgttgaggacgtatctggagaaagggaggcccaggctggtcaagccggggacgaaaagccatattttcctgacggtgcgcggacggccgctgaccagggaacgggtacgccagattctccgggaacgcgccagggccgcgggaatagaacagcatgtcttcccgcatatcctccggcattccttcgccacgcatctgctggagaacggcgccgacctccgcatcattcaggaaatgctggggcatgccgatatttccaccacccagatttatacgcatctggaacagcagcggctgaatgccattcatcaccgcttccatcccaggggataataaagctattctcatccatgtgccttctgcgggcatatatcttttaaaatcaaagtccagcgcgtttatttcactagttccatattttgcattacatatattatgcgaagtattaaatcagggtgaatctccgcccgtttttccttcttcttcgagtttttacattcccccgtcagccagaaggggtttgcggcaactggacaaatattggactgagcgtttgcgaagagttatagaatgaataaagagtacggcttttagccgagtattgattcagaagcctgcaacgctccagattgctttttcactttcctccccatttcccgatagctgctctcttccggcaataagagcatcgctgggattttcatgcgtcgcttcctgctgtccgtccacgcgtctgtacgaaggccgggaaaccgctttgcggttggacggaaagcggaaagcttgaagtctgaaagaggcacgaaccaaacctccgttccccagggggactgcctcctgtcaaaaacatgggaacattccatgcaccctgtattttccagtgggcttcatttctggatcccgtcctgatcaaatttctccatttaaaggggttttcagtattgccaacctttcttccatccccatccgtcgctgaaaacccccatctagcctgcctctccattcccataaaaataaaaagtctttcactgactaacctattataacgcggcagaaacgggaaaattccttttccctccttaaaagttcatccggataccccttcccctcgcttctctcttgccagaccgtcattcatccgtcataatgaaaaaagcatgaatactttcgtctctctttgcgtgatcggaggcctcagcctgggctccctctgttatgcgcagcacatggataacgatgccaagaagaaggtgatcaaggatttggataacctgctcgccctgaacaggtctgcggaaaccaaggtgatcaatgccgccatcagcaagctgaattccgccggcagggatcccagcgccgcgtacgacctgctgatccagtccaaaaagttcctgatggaagcggaaaaggagaaggacaagagccagggcaagagcgccaagattgcctccaattccctgaaggactggatggaccgcgaggccaagaaataccaggacaagaatgcccgtaagggattgatgcttcaataccagtggggcgtgctcgtcctcaaggcccgcctcaaggaaaacctgatgaacgctacgtcaagctccaccggcggaacggaggaggagactctggacgttacggagttccagaagccggccatggatttgctgaacgcctacctggccgcctgctccgaccctgattttgtcgatccctcttccacttcttccaaaaataacaatggaggtggagccgggaaagccggagcccgcattgcggaacaatccgttttgaatacggaggtcggggaggccctgggcatcggcagcatgtcttccaaggcttttccggattccatgaaaaaccgggacgagattttcgacaagcttttcttcacgggataccgcaagacgcgcaatcttccggccctccggcaggcatggggcaagagaatttccatggaagtggctctcggcaaggtaagccatgccatttccaccggcaagaagtccggcatgcagggacgcattgccaatgcgtccgaagacgagtttgacgaacaggattcctccgtcctggaccgcctgcgctggcgctgcgaactggattgctttgacctgggcgaccaggcgaacgccacgcggaacatgatgacgctgatccggacgacggtagacccggtgcgccgggaacaaggtatccgcaccctccgggacaagctggtccagagcatgaagagcatgatcgcttcctcggaagatgaaaccatggcggacggttcttcctcctcctcttcagcctcccctcgtcccgcggtgcggcctcccagaaggaagacgccgcccaccacgatcacgaccagccgtgaaatggacgatcccggagccatcggcacggatgtgccgaagccgcccaagccggaccccacccggagcgacgatttttttgaagacgcataacgcttttcagtaaaggctgttgcctgcacggcggctccggagttgatggaatgcacagagcatccttgacgtccggagccgctgttttatacagtagggccatgtatcagccatttcaatttttcatgcccgcgcaaattttctttggcgcgggttctttggacaatcttggttacgctcccctgcccggcgccaaggccctgattgtcatcggcggcacgtccgtcaggcggctcgggtatctggaccgggtgcaggctttgttgaagaaccagggagtggagagcgtcgttttcgacaaggtgcagcccaaccccgtggtggagcacgtgatggaggccgccgcgcttgccagggagacaggctgtgatttcgtcgtcggcctgggcggaggcagcagcatggattccgccaagagcatcgccgtgatggctgccaatccgggaacctactgggattacatccagggcggttccggcaaggggcttcccattcccaacaagcctcttcccatcgtttgcatcaccaccacggcagggaccggaacggaagcggatccgtggaccgtcatcacgaaggaggatacgcaggagaagatcggcttcggcttcaagggcaccttccccaccatgtccatcgtggatccggagctgatgctttccgtaccgcccaaattgacggcctaccagggctttgacgccctgttccacgccgtggaggggtacatggccacgattgcctctcccatgggggacatgttcgcgctacaggccattgaatacatcgccaaataccttccccgcgccgtgagcaacggggacgatctggaagcgcgcgcctacgtcgccctggccaatacctattccggctttgtggagaccatttcctgctgtacgtcggaacactccattgaacacgccctcagcgcgttccatcccgctctcccgcacggcgcgggcctgatcatgatttcctgggcctatcatgaagcctatgcccccgcctgcccggaacgttacgccagggtagccgccgccatggggcaggaagcttccgtggacggcttcctgaacggcctgaacaagctgaaggaggcctgcggcgtggacaaactgaagatgtccgagttcggcattaccccggatttgtttgacgaatacgccagaacggccttttccaccatgggcaacctgtttgagctggaccgctgcaagttcactccggcggacgtcgtcagcatcctggaaaagtcctattcctaggagcgggtaccgccgacaggataaacgcggacaggctgcgtgcacaccaggcagccgtgcggcagcctgtccagccagcaggagattttgcccaggaacgtttcaatgcgttctgaggtgtctacgatttcaatgatgacgggcaccttctcgacaatttcccagaatgtggggctcatcaggcgcgtatgccgcccggcccccatcagtcccttgtacacggtgcagcccgccatgccgtagcggcgggtagcgtaggctacggcctcgtggacgggtacgtgtctgacggcgtcggtgctgctgacgtagatgcgcagcatgaggttttcttccggagtgttcatgattgtctcttatctggcggccaggtatcccaggccaatggcaatgagccctccggcaaagctgaggagggtgtaaagaaagaaggcgggaaagttcccctccttcaacaggaggaaggattcattcatcagcgtggaaaaggtggtgaagccgccgcacaggcctacggtaagaaaaagccgcgtttccgtatgcagcagcagaccccggctgaacagcccgtagagaacgccaaggaccaggcatcccagcaggttgaccgccgtcgttccccatggaaaggaactcatggagttgatttggacaaaacgggtcagcaggaagcgcagcacgccgcccgcaaagcttcccagcccgaccatcagcagcattttcatcatagcggcttttctccggttgaacgggaataagactccgggcgagattccagggatgccgttgccggatgctgccgggaaaggcggcagaaggcggaggaaattggtgtaaaggcgttcatgttcgtatggggtgtccttcaccgaatacaaagcttctgcatccggtgtgatacagaagccatcagcctgccgtgcaggcggtttagggtgcgttcccagggaagagcctcatttcctttaagcgcgtacaggtaaaataacccgttttttccctatctccagccttttattcttgatcccggcgtttgaatacgtatttccttttttccatgtcccagcccctccttgtcaccggaaccattggaatagacaccatcctcactccccgcaaccgggcggagggagttctgggcggctcggtgtcctttgcggcggtggccgccctgctttttgcggaccgggtggacgccgtcagcatcatcggagaggatttcccctcccattatgaagaagcccttgcggccaaggggctgtgcatggacggcgtggaacgcaagaagggtccttccttttcctggaccggggaatattttgacaacatgaacaagcgcaggaccgtctgcgccaatgatgccgtgatgctggaatggaacgtgcacgttccggagtccttgcgtaaccatcccgtcctggtgtgctgctgcatggttccggcccagcagctcaagtgcatggaacagtgcccggacgcggcactggtgctttccgattccatggacaagtggctgcgccgccagccggaattgctggacgccgtcatcagccgctcccatatcaccatgatgaacgaggacgaggcgaaggagtacgcccaggcgtccaccgtgctggaagccggggaattcctgctttccaagggcgcagcatatgccgtggtgaaacagggggaatacggcgccacgcttctggggcgggattccgcaggcaatctgcaaattttccgctgtcccgcctatcccctgaaaacattggtggaccccaccggggcgggagatacgttcctgggggcgctggccggctacctggccaccctgccccccggccttccatcctttgaggaagtgaagagggggattgtgtacggcacggtggcggcctccttcacctgcgagtccttttccgcggacgccctcctttccatgacggaggaaaccttccgccggcgccttgaagagtatgcggagatgtgccgtctgcccggcgtgtcttgctgatgcggcagatagaggtgcctccgccgcccctgggaatgaggaactccttcccctcatgattcgtcaaattgccggggtttggttccggtctccgtagtgaagccagctctggcttttctgctttccctgttgcatgcgcgtagcagcctttttcataagggccgggaggcccttatttccaagaggggccaggagaaaagcggccaagcgggatgcaggacatggaaaaccccggcgtgacgagcacgggccgggggttccataaagacaggggccggtatcagccggttcagatgtcctggaggccgaatctgagttcggcttccgataccacctggccgttcaccaggcagcggccgagggcctggccgatgttgccgcgcatcttggtcagctccgcctcaatgatgagcgtatcgccggggactacgggacggcggaatttgatcttgtccgcgctcatgaagtagccgagcttggtggcgttgccgggctggcgcagcatgacgatggaggcgacctgggccatggcttccagctgcaggacgcccggcatgaccggatgacccgggaagtggccctggaagaagagttcgttcatcgtcaggttcttcaggccgcggcacttagtttccccttcaaagccgatgatgcggtccaccatcaggaagggatagcggtgcggcaggaggctcatcacttcattgatgtccagcacggcgtctccgtacggcacgttgacgggattgggcgccatctgctggttgcggcggtgttccttcttcagcttggcggtcagctcggtgttcgggccgtggcccggcttgatggcgatcacgtggcccaggatgggcttgccgcacaggctgaggtcgccgatgaggtccatggccttgtggcgggcgaattcattgatgaagcgcatgggctccttgctcatgagctcctccccgcggatgaccacggcgttttccaggctgccgcccttgatgaggcccttttccagcaggggcttgatgtcctcgtagaacgtgaaggtgcgggccggggccagttccttttcatacgtttccggcgtgatgaccgcgtcaaagtactgggtgatgcggttttccggtcccacgcaggtgacggagacgcggaattgcttggaggggagaatggtcaggatggaaccgcccttggtttcaatggtgacggcctcgcgcacttccagatagcgccgcggcacttcctgctccacaatgccggcgctcttgatcagttccacgtagggagcggaggaaccgtccccgatgggcggttcgttggcgtccatttcaatgacggcgttgtcaatgcccatgcccgtgagggcggaaagaatgtgttccacggtgtgtaccttgacggagccttccgccaggctggtggcgcgctccacggtctgcaccttctccacgtccgcgttgatgaagggctggtccggaatatccacccggcggaatttaatgccgaagtcggcgggggccggcttcagggtcagggtaacgggctgtcccgtatgcaaagaggtaccggccagagaggccggagagccgacagttctttggtttccacatgccatgcggggaatgctagtgaatgagctcccgtttggaaagcacgaaatcacggattttcctgtaaattcagggaaaggagggcattccggcgtgtcatccggagagggagcggagaaagggcgcttgaaaaaacgcctttctcccgttagtcatgttgcatgcacatcacagcaggtcccggcatttcccgcgcattcatcctcggcgccgggctgggcacccgcctgcggccccttacccacgtgctgcccaagccgctgattccctttttccatgagcctctcgtgctgcattccatgcgccgctgctacgactgcggcatccgggagttcatcatcaatacccaccatctggcggaagcctgggaccaggcgttcccggaacgctcctggaacggctgccccgtccatttcagccatgaacccgtgctgctggattccggaggcggggtgaagaagatcgaacccctggcctccgcggaagaacccctgctggtgattaacggggacatggcagccaccttcgacctgcgccgggtgatggaggaccatgtcaggcaccgccccgccgtgacgctggccctgcggacctccggggacaagaggaacgttggttttgatttttcctccggccaggtgacggacatgcggcacgccctggggcgcgatccgggcgcctgccagtttaccggagcctattgcatggagccggaggtgttcggccgcatccctccccgcgagatcgtttccatcatcccggtgtttctggattacatccggcaggggcgcctgcgcggcgtgctggcggacgatggcctgtggatggacatgggcacgccggaggcctatatccaggcccatctggactttccctcccctgctccgcgcatccatcccggggcggaagtgtcttccggagcctccgtggacgctgccagcgtaatcggcccccgcgccgtcgtggaggaaggctgccgcctcagggagtgcgtcgtctggcccggcgcccgcgtgcccgcaggcacctgtgcggaacggaggatttttcatctatccctttgactgtcaaccatgccttttctgcgttttctccttctccttttatttttctgcggctccgtccaggcggagcaccgcgtgttcaccagaaaagacggcttcctgtccatgcgggacaagctgaacgtctattttttccagtctgacacgcaccgccttctggtgcgggatgaggggagcgtccgggcgccccggtacggctccctggacaaggccatgcgcaagagcccctgttcggcaggcgtcaacggcggattcttcggcgcggatgcggagggaactcccctgggcctcgtcgttcaggacggcaagcgcctctccccgctggccacgggctccttcgccgtgtccggagtggtgtatgacaacggaaagaacggcttgttcctcatccgcagctccgcgctaaagcgcatgaaaaaactgcccgccatgcaggcggccattcagggagggcctttcctggtggagaacggcacagccgtcaaggggctcaacgcccggaaatccacctaccgcaccttcatcgccacggacggaggcaagcggtggtgcatcggcgtatcctcctccgtcaccctgagggaactggcggagtggctggcgacccccggcgcactggggaatttccgggtaaagacggccctgaacctggacggaggctcatcctccgccttctggtgccatgagtccggcatttcctatcccgcgttcaagcaggtcaggaattatctgggcgtggcgcccgccgcgcgccggtaaacgccgtcctttacaggtgcgccatcgcgttttcccgcgcctgccctgcgcagcagcaaagccgcaaacagcaggaagcaggccagaacggcccagtcacccagcagggcgtacagggtcatttccgtacagcccacgggcagcgtggcggtcatcacccccctggtaaacggggagccggaggagtccctcaaatccgcgataaccgcgccgttgggagccagcgccacgctgacgccggtgttggcggcgcggaccatggagcggcgcagctcaatgcaccggaacgccgcgttgcgccaatgctgttcattggcgcaggagcggttgaaccacccgtcattggtgacgttcaccatcaactggggttcctgccgcacgaagcggcgcacccagcttcccactacgtcctcaaagcaaaccagcggaatgactcctaccgtggcggagctccccgggcgcatgggcacgggcacggggctggaggaggcgcccggcgtgtagttcatccccattgccgttccggcggaggcttcaaaggccttttccaggaacgggaaggtttcccgcatggggatgtattcgccgaaggggaccagcatggccttggcgtgcggcctggccgtggagtagtccccttcaaagacggtgaggcagttgtaggcccgcgccacgcggccttcatcggacaggtaaatgtcatccgtgcccgtcagcaggatgaaattgcatatcccgttccggagggcctggacgtagtcctcctccacgctcaggaagttgacgttgtcctggttcggaaagcgttcccccgtggaatcgcggtaaaacgtggaaatggggaaggaactctccggccagattacccaggccggcatgtccagggaggcttccgtcccgtttttggcggcctgttccagggcgctgttctggaggtccagcatcccctgctccgtcgtgtccagcagagcccggtaaatggcgccccggttggctgcgtcccatttctccttctggctcaggttaagctgcacggtcatgacgggaacggtgaatttgccgttccccgtggctgcggcggattgcggggagtagcgcgccgtccagagcacgccggtgacgaacatgattaagagaaccgccaccagcgtgaaaaagtcccacggaacggtgcgcctgccttcatggaccaccatggttccggcccggcggcagacgcgccagagccagacggaaaagacggcagggaggaaggccagggccgttacccccgcatattccgcccactgggccagcggatttccgtaaagggccacgcccaggttgttccagccgaagcccggtatgagccagcccctcacccattccaggcacacccacagggcagccccccccagcgcggcgcaggcgctgggcagcatgtcccccaccgcccaggatttccacgccgccctgcgttccttcaccgtctgccgcgccccgggcagcggccgggcgtccggacggaaaaacacgcccatgaccagcgcccagatgccgggaaacaagccgccgtaaaatatcatcaggggaatatagcccagcgtgctgacttcattgacccaccagaaggagatgccgtaaaacaccacgccgaacatccagccgtacagggcatacgccaggattccctttttcccctcccggcggcggccgtaccacagcgccgtcagcaacggcagaaaacctatccagacacagcctccccagtccacgggaatgaaggcgcaggccatcagaacgccggaaaacgcagccagcagcaggcccgcccagacgggcaggagacggggagtgggaggggaaacgggattcatcgtaaaaagccttttattccagaaacgggaatggcggcattgttcctcatgctgactcattcctgcaacaaaaaagattgcaaaatttgctcaaatgcggaaatagtgggcgcagttcatacaacccatatacataatggcagacatcgacgaaaaaacacctctaaacgtccccggcaagttttacgtggacagctcctgcattgattgcgacctttgccgcgaaacggctccggaaaactttggacgggatgacgacgaaggcgtctcctacgtcaagaagcagccggacaacgaaaccgaacaggaagcctgcgtggaagccatggaaggctgccccgtggaagctatcggcgacgacggcgaataatatattctccatattattttttaaccgcccggggctgttgacatccaacactccgggcttttattttccactcatggcttctccctggtctccctacatgccggacagggaccgtccggaccccaacgcctccccgccccggtatgaatacctttcccgtgacgaacaggaggtgaggcaggcgctggcggactggttccaggtacctccctccaccagtgaaacacggaatctccatacggcggagtccctgctgggagacatcctgtccaagctccccctggatggagaaggcatggaccccgagctgctccgggaaggctggctgaaagccgcggggccattcctgggccagcaatccaacctgctttccatcgtcaagggagttgccaccatccaggtgcttcagccggccatgcgctaccacctccagcagtggcagggcgccctgctgggaaaattgaaggaccagttcggcaaggatgccgttcattccatccgcatccggatagggtaattccgcgtgaagcaaggctttctcttgctgccaatcacctgattttcatcgcactaacaggtattggaatacgtttcagggatttgcaatccgctgtcaaccggttttttccctcgcttgattcatggtcaggaccttcccgggcaccgcctcttgtttttccagcggggaaatagcgggaaataaaatgttagatatatttatcattcatttattgtaagaatattgtctgttttttacttttgctgtttctttagcggattgcaaattctgtagtttcatggcgaataaagcggaattcgcgccagtgcggagcggcctttccgctttccaacagaaattacatacaaatgaaaacgtcctttttcctggcattacccgcagcggcagttctatcggcacacggagcggaggcgtggagttcccttgacggaattattccggagctgaagatggggaaaacctccatcacccgcatcgattattcctccggaggcgccctgatcacgaacggagggccttccgcaagcgccgttcaatccgtccttggctctctggatgcgggatggtattccggcaataagaatagagataccggtacgcttgcctccgtgacggcggatggcgctaccaatctgatttccgccaacggcgcaggaggcggatttacggccgtcaaatttcatgaattgtcctccaacgccatatccggatatgaagcgctgaggatttcctttgatacaggcggccttttcgaaaccaacaggacgggccagcctcaaaatttcagcctgtggtacagtctgggaggagagggagattctcttctccaggttgggtctacgatttccggttcggcgggagacgtcagcaacaaatcctatagctggacaatttccaaagacgattacagcaatttgtttgaccagggagccactttttatctggtgatgaataccgacgttctcgacaacagctacgcttacaacgagcttgccgtaaaaaatttccgcatggagggcctcacggttccggagccttcctcggctgctgccgcattgctcgggctgggaagcctgtgcctgacgagaaagaggagataatgcggcagaaaccggaacatccctaagtccggaattttgcttcattttaagtttgatgaaagacagttcctcgtttaagtgtagtaatattatgcgattatccccttccctccttttgctggtatcaggcttaatgctctgttccccctcttcctatggagactggacttccccgcatccactccagcaggaagaagccgctccggcagccctcattcccttcccggcccatgttgactggaagacggggacatgccccaaaaaggctcctgtttccgtgaaaaagaacgcggctctggccaagacgctgggcaaggaaggctacgagctccaggtccgccccggcggcatcctgatcagggccgccacggacgcaggcgttttttatgcccgcaggacgctggaccagctgggagccgggggggattatccatgctgcgacatcaaggacagcccggcgttcgccatccgctgcttcatgcatgacgtaggccgcaatttccggtccattgagacgctcaaggcggacattgatgaaatggcccggctgaagctgaatgccttccactggcacctgacggattaccccgcatggcgcatccagtgcaagaagtaccctgtgctgaatgacccttccaagaggatcaagggccgggacgtcaacgacacctacacttacgaccagatcagggacctgttccgctacgccaggaagcgccacatccagatcatcccggaaatcgacatgccggggcacagcacctatttcaagaactgcttcggcttcccgatgcacgatcccaggggcatcaagattctggaggaactgctggaagagttctgccgggaaattccggtggagatgtccccctacctgcacatcggcgcggatgaaatccgcatccccaacgggaagcagtttgcggaccggatggcggccaaggtcaaatctctgggccgccagcccatccagtgggcgggcaacaatgacctgcccgtttccggagacagctacgcccagttgtggaatgacgagaattccgtaggactgccggaccccgccaagcagaagaatccctattttgattccacggcaggctacatcaattcctttgaccccggcattctggtgcgcaggaatttcttccgccagccctgtggaacggcaaagagcgacgaccactccctgggcgtcatccagtgcctgtggccggatacccgggtggaggacaagaagaacatccccatccagagcccccagtggcccgccatgttcgccatggctgaacgcagctggaagggccttccggaggatggctcccgctttgccggcaaactgccggagaaggatacggaggcctaccaggctttctccctgtttgagaaacgcatggaagccctggccggaaacaagcccttcccctactggcgtgattcctttgtggaatggaccgtgttcggccccgttcagaaggacaggcaggaggaagtgaggaacggcctgctggcggggaaatcccctgcggggctggagccggtccaggcgcgcggcggcaatctgtacttccgctcccgtgcgggagcggaaggcctgttctccaaagcaaagcccggtaacaccgcctgggcggagacgactttttacgcgcccagggcgggcaccatgtacgccatggtggggttcgacgctccggcccgctccacgcggcgctgctccggggttccggttgccggtgaatggtcccagtgcggtaccaggatatgggtgaacggcaaggaagtgaaaaacccccagacttacaagctggcaggccagcggcgttatgaaaagcacacctggcattctcccgccaatgaaatatcctttgacaatgaggaattctggtgggcgcggcctccggttcccttccaggtcaaggccggggaaaacaaaatcctgattgaacagccgtacacgggggacttccagtcctggggcgtcagcttcattccggtgaaaaaatccggagaccgctggattgcggactcaagctattatgccaagggcagggaagaaaaataaaattccagcaatgagaggcaaacatttatttcccctgctctccctcctgctggcggttcctttcgccatggccgcccagcgtcccaacgtcatcctcatcctgatggatgacatgggctggggggacctgccctcctaccaggaccagcgcatgaaagaggggcttcccgccatggacaacccgggcctccggacgctggcccgggaaggaatgacgctgacgcgccactactcctccgccccgctctgcgccccggcccgcgcctccctgttcacgggcgtgcaccagggccatgccaaggtgatccgggacaggtcctttgaccttcccattgaacatgcccccaccctcggcaccgtcatgcagtccgccgggtacaggacggccctcatcggcaaatgggggataggcggaggaacggaacacgcgggtaccccgcaggaatccacgtcctaccccaccaggcgcggttttgactactacttcggctacctggaccacgtcagcggccaccaccattatcccaaggaagaccccaatcccatttcccccaccaagagaagcggcatctgggacggggacaagtgcgtcacggcggattgcgacaaggcgtactccgtggacctgctgacggcccgcgccaaaaaatggattatagatacgcaccgccagaatccccgccagccctttttcctggcgctgacccacatagccccccactcccagctccagatccccaccggcccctatccggaaggccgcggcgtaaagggcggcgtgcaatggatcgggaagccccacaagctggtgaataccgcggagggcaagatcaactcctacatctatccgcggtatgcggacaagaaatggcccatggcgcagaagaagtacgccaccatgatcgcgcggctgagcgattcctttgaagacctcatccagactctcaaggacctgaacattgacaggaacaccgtcatcatcatgacgtcggacaacggcccgcatgacgaaggcggccagaatccgcagttcttccgcaattacggaccttttgacggcatcaagcaggacgcatgggaaggcggcttccgcgtgccgaccatcgtccgctggcccggccgtgttccggccggttccgtcagcgaccatccatcccagttccacgactggatggcgacgctggccgccatcggcggcgtcagggctcccttccggagtgacggcgtttccctgctccccaccctgctgaacgacggaacccagccggacagctgtctgtacatggaatacagcgccaagatgtcccggaacaagacgacgacgcccggctaccaggattttctcccgtccaggaggaacgccgtccggggcgaccagcagatggtctacctcggcaaatacaagggggtgcgtaccaacatccagtcccatgcggatccgtttgaaatttacgacaccgcgaaggacccggcggaacgccatgacctaaaggacacgccggaagggaaaaagatgcaacccatcatgcacgacaaggtgctgagaatgaggcgcgtttacgattatacccacccggtgcgcggcacctttgcccagcggccctatgatgcagaacctgttccggccctccggaaagaggaaatgcccggcaccctggttcccctgacggcgcagtcctcccagggcgtccgccggaaggacggcagcatgaaaagagagctctatctgaacgttccggaaaccgggaaatacgtcttcttcatgaaaaccccggcgaaaaagggagctaaagcgttcgtcaggctgcacgacgcgcatctgctggatgcggaatacggctacaagcccggcgcggaggtatcctcctccatgggggaaggaacgacggaaggagatgcaggaaaaactgggctgaagcccatcccgctggaaaagggctggcatcccctgttggttgaaacggaaggcttccccgggcttcccgaccttttctggcagagggaaggcggcaggaaagaggccattccggtccaggccttccgcacggcggctccctgaacggatggggcgaaacgtccgcgccgcccctgaggtcattttcccccggtcatcaggacgagggcgcgcgggaaataccgtttgaggaacaggtaaacgccccgcgccagcatgtacacgacaggcaccaggcaccaccagacccagggtgcccacggggacgggaagcacgtttccacccctgtcagggcaatcagcacgaagatgtgggaacaatacacgaaaaagctgccggacgaccaccgcgccagccgttccgacagtgcggggctgacggccctggccactattccgaagctcaggaaggccagaacaatcagtccggaaaaagcgacgtccggaaccaggaaggtatccgcacagcttgcccagacaagggccgcagaggccagaataatggatgagtgcacggccaggggcatcttcccccagcggtccaagcaacccggtgcggaagacgccagcatgatgccgagcacgaagtccccgaacatatagggactgggccacgccagggtgtcatcccaccggtgcaggaacagacagaacaggccgagcgcgtaaagcgcgggacgccagcggtgcagcaggaacaccgccagggtaaaaatcatcaggtcccgcaggaaccacatcggggtcagcaggggacacgttcccgccccgaacacggaagccagcgaaccaggggaaagggacatgcccgctaccagccagtaggccgcgcaccagaagaggtacggccacagcagggacagcaggcggcctcccgtccattttccggccccgctcccctccaggcgggaggcggaaaaatatcccgccagcaggaaaaacgtcgccagcgccggaccgatcagccattcgttgggaagaaaggggccggaaggcacatgctgcatgacgacgaccagcgttgccagcagccgcgcagtctccacccagggcaaacgggggcgaactgctgtgccggataagggggagatggtcatgacggggcccattctggatgatcgctctgaaaaagcactatttttattatgtgaataaccggcctgtcgttcgcaaggcggcaaaatgctttcacaacaggcacgcatgaaacaggcgttttcccatacctgctttcttatgccgaaggggaagctggcggcgtgtcaattcaatctcatgtacaagagcgggtaagggtttccctgctcgtcatgggccgttcttttatggacttgaaagcccatgtattcataaaaacctctggcgagcggattttgctcgttcacggccaattcattgatggaataagcttcgattccatattccaccaacttcttaccgaggcctttcccccgttcttcgcttgcaatgaacagcatttcaagtttctggccgccaatccccatcaggccgacaggaaattcgttttcgttctccgcaacgatcagatgaggtatctctcttaatgcttgcggaatgtattccttaatattttctatttcgctgtccggcaaaaacaggtgcgtctccctgacagatttttcccacagttccatgagctgccgtatcagcaacggagttttttcctggatttcaatgattctcatattccactaaaagctgtcttcattaataccggccataccttggcgtgcttgcgcattggcagcactcctacctgaccggacctttacaaaatcccgtactgctccgcaaccaggccccttatttcatcaaaggttttcactgcgggaggattgtccgggtggtttcccagatgtttttccatccacaccatatggtaccagcggccgaacttgtacccgcactgatgaaactttcctgcgaattgatatcccaaacgttcgtggaactgcacgctgtcccgcccaagccaggggtcttccgcctccggacaggcaatgcaggcgtttagattcaggatattctgcaaggaaagaatcttttccagcgctgcgtacaattcccgccctatgcccatttttttccggtcttcccggacgtaaaccgtcgtttccacggcccagcggtacgcggcacggttcttgaaaacgccggcataggcataaccggcaatttccccttccctttcgcaaatcaggaaggggtatttttccagcacatggccaattctttcctcaaattcctgtacctccggtacttcatattcaaacgtgacggctgttttttccacatacggagcataaatttcaagcagctttgccgcgtcccgccttgtcgcaatcctgatggtatgatgatttttcatcccgctccccgtcttttccgattgatctccctgggcccaatgccgccattctaattatttcacaggcaactgtcaatgttggcgcctccggcagggaaaacacggcccggcgacaagaaagccggataatgtgcctcgccagcttccagccgccggttcttccgttattccttccttttaacggcaaaaaagaggtccatggaaggatggctgcgaatacttttttccgtatggagttcgtactccatgttcagggtcccgtatgggctctgcgggagccatttttggtaaaagtaccttttggcggccccaatggccgcgccccataaaaatcccagccggggcctgaccgtcattccggcatattccccggggggaagaaacgcctgctccagcccgtctttttcaagtgcgccgcccacaaatagttcaaaggaaccattccggccatcatagtttctggacagaacaaagaagggaagcacgcttccccgcggcacggaagccagggaatgataagccgctgaaagggcatggatatccgcggagatcgtttgatcgccggattgcctccctattccctagatggcctgttcccccaggttcactatttccactgccgattttgacatgccgttttttctcctaataaagttccgtttttccctgcccgcttgaaccagtgcgcccagtaatgaacatgctgccctgcatccattgcggcaacagtataaaccgggtttttcacggcccttcccctacgtttccccggtagaacgaacgcccgcaaaaaggccggattccccgcggaacccggccattggaaaggatacggcatcgtgccggtccccggctcaggaataaaacccgatgtccggctcacgttcctgccgcctgcgcttgaaatacgggttgcggtagcggtggatgcacttgctgggggcgccgggagtatagtggagcgggtccgcttccttggcggcttcccggcccagtatctccacaaagtccttcagagatatttccaggtctgcatcgtggcatgccagggcggcggacaggcgcaccttcccgttgtcatagtccacgtacatggcaaacagcgtggtctggtacagatgccacggttcgctttccaattctccggactggtgctggctgatggcctccagcagccacgtcagcgcgtgttccagttccagattgtccagaacatcccggatgagggacgtttcatggccgaagacggccacgctttcctgttgtcttgccctgttgattttcatgtcttggttctcctttccggtttcccttgttgagcggggacggcggatggctctgccgctccaactagcttggacactttttttcaacaggttgttcaatatgaattcgggaatttgtcagcccatgtccactttcccgatgtagggcaattcccggtaacgctcatccaggtccatgccgaagcctacaagaaattcatctccctgcgtaaaacctacgtagtcagcttcaaaaggcactttccggcagcagtgcttgtccacggccacggcggtgagaacctgccgcaccccctgccttttcaattcccggcaaacttcagccagagtagcgcccgtatccagcacgtcatccaccaccagaacgggcacgtcaggccggaacggcccgcagtccccatcccatgccacggagccggaatgttccattccggcgtagctggtgatcttgacggttttcaccacgggccgggatttcaaatgccctttcagcatcgtggcgaaagggatggcgccattcagcagcagcagcagaatatagggcctgcctgccatggccgcgtcaatggaggcggccagttccttgacgcgcgcgcggatggcttcctctccaatcaggggtgtgatggtgtaagtcatggaaacggaagcatgatagcgttctcccacaaggaaatcaatccttgaaggagaacggttgacggcggaaaatgcttccggtatgttgcggctgagatgatcggcatcccgaactaccgcatgttttcagggtttctcctggtgattcttccgctgctgtggctgggcgcatgcgcttttacatggattttcctttccattcctccccagccggaagttatgggagagagcatgagagccgttttctcccttttcgccccgtttttaagcgtgggaatcctggcggttctgctggacatctggttcggcaagaggatttatgaagccagaaacggctgggtgcatgcggaaaaaaggctgttcggcctgcgccgggatgcttttgactatgatccggagcttttgtcggaatgctccgtgcttcatgtggacgagcatacaccgttgagcggggaagaactggaacggctgaggcatgcaggcgccactatctgccgcaggggaagaagggggccgcaatatccggctccctgctgggtctgccgcctcgtttacgacggccaggttctcttcctgctggcggcgccttcacgggaacctgccgaccgtctggcggagttcatggcagccgtgatacggacacgccgggaaagaggcgcgtgatttgctcacagaccgcttccgctccgggaagcgcgggccagccttgcggctccggttttccgtttggcgggaaccggtagcggaataccaggtcttccggcccggcccgatgggcaacaaggcggattttccgcagttccgccccgttccactgccggaacaggacgccgttgccgtccgcggacggccccagggacaacaggcgcatattcgtcagggcgtgcaggacggcgttggcccggcgcgtttccaaaaccgcgttgatcaaaagcatgccgaggagggcaataccaaaaaaacagcatattcccgtgaccgccagcacgaacatgacctcacccgtccagaccggagcggacgccgctatgcaacatccccagccccatgccgcggcaaagaaaaccgaaaacagcattcccttccattccttcgcggcccttctccaccatccgcagcgggattttccctgccacaggattttttctcccggcagcaggcgttcggccagtctgtcacgttcctcccgtgtcaacaattcctgcatgtttatcctctccgtttccgcctctataccagacggaaaggcggcttgcactccttttgttccgggaaatgccgatcagcaacggcgtagtattgaaatgagcgtcggcaaactttttcctgaaatccgttacgtccctgcggacgcgtgccgttcaatggcctccaggggcttgcggcgcttcatccggcagagggcgcggaggcgcatttaacggtagcctaccgctgggccgcatggtaaagtagggcagaaatgactgattccccttccaagcgcctttttattctggatggaatggctctggcctatagagcccattttgcctttttctccaaccccatccgcaattccaagggcgtcaacacgtccgccgtgtacggcttcgccaatacgctgctgggcattctggagcatgaacaccccacgcacatcgcggcttgctttgatacttccgcccccacggcgcgccatgagctttaccccgcctataaggccaacagggagtccatgccggaagatttgagctaccagatgcccctgattttcagccttctggaggccatgaacattcctatcctgcgctatgaggggtatgaggcggacgatacgataggcacgctggcccgcatcgcggacggcactaaggagttccagacctacatggtttcccaggacaaggacctgggccagctcatttcccccacctgctatttgtggaaacccggcaagcggggcaacgaccacgaggtggttgacctggaaaagctcaaggaacaatggggcattgaacgcgcagaccaggtgatcgacatcctggccctcatgggcgacagctcggacaatattccggggcttcccggcgtgggtgaaaagacggccaaactgctgatcggggagttcggcaccgtggagaacctgctggcgaatgcggacaagctgaaggggaagcgcaggcagatcgtagaggaaaacggagccatggcgaccctttccaaacaactggccaccattgaccgggacgttcccctgaccgtgaccctgcctgaactggtcaaaagagatcccagtccggaagagctgctggccctccttcaggagcttgaattccgttccatgcaggccaagctgttcgggaaaaaagcgccggaagccaggaagtcccccctccctgcggacgatttgtttgctccggcccaggcggaacagcccccggcggaggctcccgccgcccctgcggcggacgcgcggcagaacggttccggccaaatggatttgtttgaggaacgccatctgaaaacggtggatgatttcaagcacgagtatatcattgcggatacggaggaagcccgttccgccatggttgccgagctggaaaagcatgattcctggtgcttcgacacggagacgacaggcctgaatcccctcacggacaagctgctgggcgtcgccttctgcgcggaaccgcacaaggcatggtacatgcctgtctccggtccggcggacctggaagcggtcaggccgcttttggaaggccctgcggagaagaccgggcaccatctgaagtttgatctggaagttttgcgcgccaacggcatacgggttaaaggccccttttttgacacgctgctggcgcacgccctgatcgcccccggcatgaagcacggcatggaccttctggcggagaacctgctgcaatattccaccatcaagctgaaggacattgccgcgccgggagccaggaagcgcgagctggataccagcggcattcccgtggaggtcatgggcaaatattcggcggaggatgcggacattaccctccagctttccgccatcctgaaaaagcaggtgaaggagagcggcatggaggagctgttccgcacggtggaactgcctcttctccccgtgctggcggacatggagttcaccggcatccgcgtgcttccggaatccctggaagaggcttccgtcaaggtgggagccattattgacggcctgcgggagaagattgaagaggccgccggccatcccctgaacctgaattcccccaagcagctcggcgatttcctgttcggggagctggagctggtgaagaagcccaagaagacgaagacgggccagttcgtgacggatgaagataccctctccgccctggctccccagcatcccattgtggcggatatcctggcctaccgggagaacatgaagctgaagagcacgtacctggacgcgctgcccaggtacatctgcccgcgggacggccgcatccacacccagttccaccagatgctgaccgctaccgggcggctggcttcccaggaccccaatctccagaatattccggtaagaacggaacaggggcgcctgatccgcacggccttcgtccccgcctccggggagtacaccatgctctccgcggattattcccagattgagctgcgcatcatggcggcgctttccggagaccccgccatgtgcgaggccttcagggaaggccgggacatccatacggagacggcggccagggtgtacggcattccccgcgaccaggtggacgccgtcatgcgccgcgcggccaagacggtgaacttcggcatcatttacggcatttccgccttcggcctttcccagcggctgggctgcccccgcagtgaggccgccacgctgattgagaattacttcatccagttccccgtggtcaagtccttcatggaggacctggtgcacaaggcggaacaggccggttacgcggaaacgctgctgggccgcaggagaatgattccggagatcaattccgccaacaagaccatcaagtccgccgcggagcgcaccgccatcaatacccccatccagggcaccgcggcggatatgatcaagatagccatgatccatgtggacaagctgctggaaggcaccaggtcccgccttatcctgcaaattcacgacgagctgctggtggacctccacaaggacgagacggagctcattccaaagattgaggaagccatgatcggcgcccttccccttcccaacggcgttcccattctggtagaagccagaacagggaataactggctggaagcccactaggattttgcggcggaccaggggcgcggaccgcccctcccgtcccccgtatttttgaattgacggatgcctcccgattgcggattcttccggattatgcactcatcatccctgccggcaattgccctggctgcctgttcctgcgtttgctttcagacagccgccgcgtccgtaacctatccggggacaacaccgggagcccccgccgcccaccgggaaggggatgtttatacgttaagcaacaatattctgagcgcctcatggaaggtggacggcagcaggctgattcccctgggaatcgtgaacaaggagcggggcgccacggacgaaaaggccgccaccggcgcccaggctccggaattgttccgcctttccacggagaaggacgcctacaatctcccctcctcccggtttgtgatggaaggagttcccgccatcagcgcattgaaagggcattccgccggcctccgcctgggggaacggctggaaggggccgttatttccgccgttttccgggacaaaaacagcgggctgacggttcactggaaggcggaattgagggagggttcctcctacgtcaaggaaacctaccggattgaagcgtccaaggaggtggatttgaagaaagtccagttgattgatttgcaggatcccaccctggccgtgaagggcaccgtaccgggcagcccactggtcagcgagcgggaaggcacgtttgccggcattgaacttcccgtagccagggcccaggccgccggaggaacgggaaccgtcgggtttgactgcaaccttcccatgggcagcggtaacgcccagacgttcaccacggtgctgggcgtatggccggagaaccagcttcgccgcgggttcctttattatctggaacgggaacgggctgcgccctaccgtcagtttctgcattacaacggctggtatgacgacggcctggaccccacggaaaagacgctcgtcaagacagccggggaatacaggaaggaactgggttcccgccacgtcaggctggacggcttcgtgctggatgacggctgggacgacgttaatgaagacctctggcagccctccaccaaaaaattcccgcacgggtttgaacctgtagtcaaggcggtcgggaagattccttccggcttcggcatctggatttctccgctgggagggtatttcggcccggaaaagagggttcagcatgccaaggacaaaggcattctcccggctgacgccgcgggattcgacctttcctgcccccagtattacaagtggttcaaaaaacgctgctccgacttgatgaagaaggacaaggtgacctatttcaagtgggacaaggccggagacggcatcagcccccatttcatggcccttctttccatcgccaacgaccttcgccgggagaatccccgcctgttcatcaacacgacggtaggcacctggccctcccccttctggctcaaccacgtggattccacctggcgcagcggtacggcggacgtaggctggacgggcaagggagacgaccgcgaacagtggatcacgttccgcgacggggcctgctataacgtcatcgtcaagcccggcccgctttatcccctgaactccatcatgcaccacggcatggtgctgggcaccaagttccaggccgcgcgcgtcagcaagggagaggacgggaagcaggacaacagggacctgaagaacgacgcccgcatttatttcggttccggagccaatctccaggaactttatctcacgccgtccatgatggacaaaaaggcgtgggacgacgtggcggccggggcccgctgggcccggcgcttccaggacgtcctggccgacgtgcactgggtgggcggcaacccgaaccagctggaaccgtacggctatgcggcatggagcccgcggggctgcacgctggccctccgcaatccggacgaccggccgcggacgattgatctggatgcgtcaaccgtctttgaacccgtcaagggagtgcccgccgttttccccatgaaggcctcctacccggaccagcgcgtcaaaacgctgaatttggaacagggcaagccggtgagcctggaacttcaaccttttgaggtgctggtgttcgacatgagaacgaacggacactgacccatgggccgccggccattgagcgcaacgccatgcctcccccttccgggcggcatggtttttttatggcctctccggagcctgatttccggagcgccttttgaaagggacaagccctcggaaaaaataggggaagaagaaatccggaatatcaaagagccaaagcgtccccgtcccgtaattccggaacggttaccagggctttcccgtctttcaacgccaccacgcgcaccttgcgctcctgcatcccttccgcggtttttacctgaatggagcttccatcccggacggcagaggagggaatccacgcggaggcgggaacctgcacgctgatgtttacctgaagggccatgttgacgggggccacctgccattcggaaacatgggaggcgttcggctccagggaggctatcagcacggcggaattgcgctcggtatccagtgcggcgtccaccgccgtaacgcggcccagccattgcagccgttttccattgttcagcacgcaggaggcggtcagcgccgtgcttaccctgccctgttcatccctgggcaatgcggaaaattcttccagcggcacgggaacccgtatcatccgctcctggaggggaatcaccttccccaccggctgcccggcaaccacgcgggccccggcacccacggagcattccaccacctggcaggtatagggagcttccagcaccgtgtcccggagggcctgttccgcttccgccacatacgcctccgcggcgttcagccgcgcgttcacggcccgtcgctgcggcacccggagcaccagttccgactcttttccgcttttggagacggagctgtacgtcttcttgatggctttcagggcttccgcctgttccgtggatacatccaggcgagcctgttccagcccagcctgcgcgttcgccaggcgtgcacggtattcaaatttttccagctccagcaggggcgttcccttcaggacgatttcccccgcgctgaagagggggtgcaccttgtccaccttcccggaaacgccgggggaaagcatcgtcaggtgggaggccttcacgatgccgggcgcggaaatggcaagagtgttcgtctgcaaatgcagcggctccaccgttcctgcggccgccttgtccttttctccggcagagcccgagacggacgggtccgttaaaatagccgttcctatcaaaagcgccgcgatccccaggccgatgcctatggaccaggatgttccctttttttgaggggcctcgctcatgaacagctccggggggaacgcggcccgttatttgggatattccgtctccatgatgtgggagtaggcttccgccgtttccacagccacggtttcaatgttcttcatcaactgggcaaactgggcttccgtgaggtccatgccttccagaacgaaggactggcggtagtagacgtatccgctgttggggtccagttggaaggcgccggccgtctggtccgcattcagctcactgaggatgatgctgacttccacacggcggttttcaggcaccttggcggcaaaaagcacgtcaatcaccagcgtctccggacgatcaatcatcgtgtacaggaggctcacgggcgtgaacgtatcacaggggacgaacgcgatgcccgttctgaggttgtggttgtccgcggaagtaatccattccgtttcttcccctctctttctgagaacggtgtacacacggtccaaaaggctgagctgctggttttccatattgaaaattgtttaacaggagggttgcttgcgaaggcgcatgcaacgtacgcgcccgtttactggattcaagcttactggcatccttctgattcgtcaagctctcctgacgtaaagaaattgaaaaagcatgtacgcatccggcataaaaacggacgccgcccggatggacggcgtctgggaagtctgggaataaagtgcgtaccgaagcgtacggcgcccttacaggatgtctccgggctggtagcccgcgccgttcgggaacctgtccgtcagctcctgcaccatggagcggaacgcttccacctgggcgtccgccatgcccgtggcggaggagttggagtcaaagatggcctggaggtccgcccggtcaatacccaggcgaccgtcttccgccaagcggtccagcaggttgttttccatgatttttccggccctcaggtcgttggagacggccacggcgtgttccttgatcacctcatgggcggtttcccggccaatgccgcgcttgacggcttccatcaggatggtggtagtcatcaggaaaggcaggtagcggcgcagttccgcggccaccacggcttcatacacccccatctggttcaggacggtcaggaatgtttcaaacaggccgtccgcggcatagaaggaatccggcatgactacgcggcgcaccacggagcaggatacgtccccttcgttccactggtccccggccagtccggagatcatcatcaggaagcccttcaggatgacgtggaagccgttgacgcgttcgcaggagcgggcgttcatcttgtgcggcatggcgctggagccggtctgccccttggcgaagccttccgtagccagttcatggccggccatcaggcgcagggtcttggcgaaggaggaacagccggaggtgagctccaccaggccggaaaccacggaaaagtccagggaacggggatacacctgccccacattcatccacttggcgggaatgcccaggtgggcgcacacgcggtcttccagctccagcacgcggcccgcgtcctgcccgaagagggagagctggtcaagctgggtgcccacggcgcctttcagcccgcgcacgctgtagcggtccatcagggaaatccaggaacccaggccgtgcacgatgtcttccccgaacatggcgacgcgcttgcccatggtggtggtctgcgcggctacattgtgcgtgcggccggcgatggtcacgtgcttccattgtccggcaagggcgctcatgcggttcagcacggccacggccttgtcccggatgatctgcatggacttccagatctggagctgttccacgttttccgtcaggtcgcgggaggtcatgcccttgtggatgtgctcgcagccggccagctcgcagaactcttcaatgcgcgccttcacgtcgtggcgcgtgacgcgttcgcgggcgtcaatggcgggaaggttcacctggtccttcacccgttcgtaagcttcaatcacgccgtccggaatatccagccccaaatccttctgggccttcatcacggcgatccagaattcgcgttccaggacgatgcggccctctgcggaccagatggatttcatggcggcggaggcgtacctttcagccaggacattgggaatcacgctcatatcaaaatgtgtgtatgcgggggttatcaaaaacggtgagccgccatgatcatgacgggagggaaaaaagcaagcactttcccgcagcttcacggattaggaatcccacgggattccacggtccggaaaagaggtcctttccaatgttcagggatggctgacaggcccccaatagacgcccgattaacattcccgccattcccttttcacagccgcacaccacgctgggagccagagcctccctgccctggcggctcgcgatggtttcacccacgaaaggcaggagcctgccgctcccaggagacggagccgcaaagccgccttccatcgccgttccgctagtttccggcgggaggttccaaaccgtaccgggcgtagccggaaacgatttcctggagaatggcggaaattttttccagggaacggacaggaacgtattcataccttccgtggaagttgtggcctccggcgcacaggttgggacacggcagccccatgaaggaaagacgggctccatccgtaccgccgcgcaccgggataatttccggctccacgcccacggccgccatcgccctgcgggcatgttccaccaggtgcatgtgcgggaggattttttccttcatgttgtaataggagtcctttacctccacctgcacggttccttccccgtacttccggttcagcagggcggcgcactcctgcatgaattccttcttgcgctcaaattccgccgtgtcgtggtccctgatgaggtactccccgaccgcccgttccacatccccccggaacgagtccaaatggtagaagccttcgtatccttccgtaaaggcgggattctggaacgcgggaagcattccctggaattccatgaggaccaggcacgcgttcagcatcctgcccttcgcgctgccggggtggatgccggtgccgcgcaccgtcgccacggcagaggccgcattgaaattttcatattcgatttcccccagggctcctccgtccacagtataggcgaagtccgcgccgaagcgctccacgtcaaaggcatccgccccgcggcctatttcctcgtccggcgtgaaggcgatgcgtatctcgccgtggggccgttcgggatgcagcaggaaggaggcggccatatccatgatttccgccactccggccttgtcgtccgcgccaagcagggtggttccgtccgtcacgaccaggtcctggcccgcatagtccgccagttcggggaaaacggcgggggaaagcacgatgccctgttcccggttcaggacgatgtctccgccgtcgtaggagcgcacgatgcggggcttcacgcctctgccggagacgcccggggccgtgtccacatgagccacccagccgatgacgggaacctccctctccacgttggacgggatggaggcgtacacgatgccggaggcttcatccagctccgcctgggctcccagcgccttcagctccccggccagcagccgggccagttccgtctggccgggagtggacggaacgctgcgggaatccgcatcagactgggaacccacggaaacatactttaaaaaacggtctaaaacggagatattcatcagaaaaatcaaggattgaggagagtctagcaccgggccccgcgaacacaagcacaagacacggtttatccttgcgattcaagatggtttacagtatgtaaacaaagcttctccccatgatgactcctctacctcttggcattgccgttgccttatccctgacctgcggcgccctgccccttctggcccagggcgcctatgtgccgggccccatgcccgtttccgccgggacaaggcaggaccccacggacatgtacctggaagcgttaaagctggtaaccaggtctgccgaactggtggaaaaacgcgactacataggagccatccgcctgacgcaacaggcggaagaaaagttgggacgcctggtgaaggcctatccacaatggcggcccaaccttcttcaaacacgccgccagctcaacagggagaagctggaccagtggcagaagctggcgcagcagcaggccgccgccgtttcatcaggccccggcctggaattggaacgtccggccgccgtgcccaagcgacccaggcccaagcccaacatcgtccttcctccgggctacaagggagtggagttcccttcccgccccggagaatccctcgtcaacaccatcccgtccccgtccgtttcccccggagcggccccggaagtagtggaaagcaattacgagcgcatccgcaggctgctggacaaaaccaccattgaaaacaaggccctgatccaggcgctcaagcgcacccgcaaggaacaggaggacattctggcaaaactggccatagcgtccgccggagaatccgtttaccgggacgaactgctcaaggtcaagaagcagatggaggatgagagaaagaccagcaacaagctcctccagaccctcaccaagcgggtggaggagctggaacagaaagtcaccacgctggaacaggaaaaagtccagtatctggcgcagattgccgatctccaaattcagctcaaggagcaccaggacaagctggccaaggtcacggatgagaaaaacgccctccagaaggaccgcgaccagttggccgccctggtggaactcaacagcccggacaaaaccaaaaacctgctggaccgcaacctgactctggcggcccagctcaaggacgctcaggataaaatcgccgccctggaaacggccaagtccgactccgaagaacagcggaaggccaacctgaaagccctggaagaggcgcgggaggaatccgcggacctgaagcagaaactgattgccatccgggatgaaaacatcggctaccgcaagcgcattacggagctgaacaccaagctcatcaatgcggatgtggagctgtccaaactggaagccaatccggaaaaaagccctctcctgctggaggaaaaccagttgctgcgctccacaatcgccaagcagctccgcatcctttccgtgcaggaccagagccgttccctgctcatcagcacttacaagcgcctgctccaggaaaacgcggacacttcggaaatcgcctccctgatggacaatgaagaagccatcaagctcaccccggcggaaaagcagattgtcaacgtcatcgccagagacaacaagatagacatccccctgacggaccagcagaaggaaaagatcaacaagctggcccaggccctttccgcggaacgcgacaaggccgcccagcttgccagggaactggaactggcgcgcagccagacgaagacaaaagcggccaaatccgccaggaatgacaagagccatgcggaagccctggcccggacccagaaggccctggaacagaaaaaccttcaagtggaggagctaacccggcagatggatgaactgaaagcccgttccgccgaacaggcgcgcctggccgccatttccgccggagccattacgccggagcaggaaaaagctctgaacaggagcatggaagccacggtgcgccggaagctggaagcggaagccctgggacagggagccgcggaggccttcgccaaaaaacgctacgccgctgcggaacaattgtaccgcaccctgctggacttccagccggcccacgttccggccctggtcaacctgggcaccatcctgctccagcgcaacaaggcggaggaagccatcgaatacctgaaaaaggccacggaactggatgcagcctcctcccccgcatggttcatgatgggcgtggcccagtaccgcgccgggcaggaccagcacgccatcgcctccctgacggaaacggtccggctggacccggccaacgctccagccctgctttacctgggcaacctggaaaccagcgcaggcaactatgaaaaagcggtgggccactttgaaaacgccttgaaaatccagccggaatcaccggacgcccacttcaacctggcctggacttattcccggctgggccgtacggcgcaggcacgcaagagttatgacgccgccatccgcagcggcggcctgccggattccgacctggaactcgccatcaccgggaccaccacccttccccgcaaaaaacaggctccggacaaagctccctcgcctgccgcgaacgaggatgaaatgcgcctggccgcagcagtaagcgatccatccgccattccccacgatgcctatgaggtgcccgcccatgtggcggaggaccccaatgccctggaaaggccctctgccgggcccaagcaggtcgtggtcagccaccgtccggaggccgggcccgtctccctggcggaccagatgagggaaacggcctccgcggcgcctgccgcacagcctcctgcggaaaccgccaccgccgcagcggaaccgcccaagccggaaaaacaggaagcaccccgcaggagaagccgcttccgcatcggttcctgacggatccgccccttcctttttctcctgaaaaacgccatgtatcaagtttccattttaggactgggcctcatcggctcacggattgcacgccacatgaccggactgggtgacaaggtcaccgtctggaaccggacgccccgggaagactttccggaagccgttcccaccccggcggacgcggcccgcgcctccaaaatcatccagctctatctgaaagacaggaatgcctgtctggaagtatttgaacagatgaggggcgcgctgaccccggaacatgtcatcctgaaccactccacgattgacctggccaccgtcggcaagctctccctgatgtgctccgccatcggctgcacgtatgtggactgcccgttcaccggatcccgccttccggcggaaaaaggggagctggtctattatgcgggaacggactcctccactctggaccgcgtgcggccagtactggaacacagttcccgtgacatcctgcacctgggggggattggggccggaaccgtcgtcaaactggtcaccaacatggtctccgccaccatggtgcagagcctgagcgaagccctggccatcacccaggcatacggcatttcccctcaactgctggggcaggccatttcccggaacgtcatcgcctcccccctggcgtccttcaagctgcccctgatggcggaacgcgacttttccacccacttctccctggacaatatgcggaaagacagcatctacgcccaggaactggccgctgaaaagggaatccacacgcccgctgccgcgctggtctcctccatcatggggaaactgtgccgtgaagggcacgcggaagaagacttcggctgtctggcggaacaattcgactaagcttttcccattgatgaaattcagaggaacatgcgcccttctgctgctggcccttctcctgcccccctgcgttcgggcgcaggaacagaaggaggcagggaacgccccttccgcggaagcgcaggccgcttcccccgttcccgttccggacaccgccctgatcgatgacgcctctgaccgtccggtattgcagggcagctccaacgtgagcgccgtaccccccgctccccagcatccggccgcggcccctgccggaacggaaggacagtccgtcaaacggcagccgttcaccagcgtttccgcttccaagcaatttcacgttacagggatggattccctgttggccggggccattgccacgcgggcggactccatacgcacggccctggtgaaaatcctcaagcagcctgacgaatggaaaaacaacatcatcatccgtctggtaggggagccgggaagcccggttccggccaaccccatccgcatgcagaccgtgattgtggggaataccctctcctacaacatcttcattcacctgggacgcggcatcaaccaggacaagctgcgccacgccatcgtctccaccctgctttatgagatgatgctgcgcacggtggacccggaaggactgccggacgaagtaacgctgcccccctggctgattgccgggctggagcaggccgtcctgtggcacaccaatgaagcggaccgggccatgtactccaccctgttccagcaatccggcatcatgaccccggaagaaatcctgaactgtccggaaccggaaaaggaactggacgccacctcctacgccgcctatcaaacctcctgcggcgcgctggtgctctgcctgctgaaccaggaaaacggtccggaagggatgaaacagcttctggaccaggccattctgggcaatgacgatcccaggaatctcatcaaacgccattttccgcagctcaacctgaccccctcctcccttcataaatggtggacgctccagctttcccgcatggcgactcctcccctgacggaaaccctcacgatcacggaaacggaacgtcacctgcaggaagccctcaccctggtcaaatacgatccggacacccggacgaccgtcaccttccccctggacaatctggaccaggccaattccctgacggacctgaacaggcagctttccaacatatccggcagcctgctcaacctcagccggcgctccttccccgcctaccggcccgtcattgtggaatacgccaagcttgtggccctgatgcagaccggaaaaatcaacggccgggaagccgccccgaaaatcgggcagcttcgggaaatcagggagctatccatgaaaaccgcccggcgcgtccgggactacatggactggtatgaaatcaatacgcggtccggaaccggcaagacattcgcctcctacgcggcagccgtcaaactgctccgtgaacaggaacagccggccaatacccccatttcccggtatctggacgatattgaaaaactgtacaccctcccggcgaaggctcccgttccttccctgcatggaaagaattgaaggaaacccgttccgctgcctggaacggccatttctttccagatgaatctccgccctccggggggcaataggcattcacgcatttctattaaaagacgggagatttcgcggtattttgatctatacctgattcaaccatgattgctttatttttcataagttaatcatgcataacaggataattccgccgcggatttacaatccggaagtcaacttatttttttgagttcaaaaaagtaacggcaaatattcccacatataaagtaggaataataaacaacgcctaatacggaaaccttatttatttataagaagttattgaatttgaagcggtcttccggattgtaaatccgatactggctccattcagtaatttttttaataatttcatgaaatcctctctgtatcttacgatgttcctgctttgctcagggttgggagcccaggccgccacattgaaatatttttatgatttcaacaagcttgacggaaacctgtcatctttaaatgacaataatctggccggcccaaatgcgggcaacgccacgttcagcggatcaggctggatgaattataccgatggctatgaaggccggggctatgatagccgcacgaacggcggacaattgacgctgggctcctccagtacgggactggggctgaatgctacggaaggtttcagcctttccattgccgtcaaggactactcccccggcaatacatcgtcctcggctatatggaaaagcatcctgaccttcacatccggcaacagccagaacatgtacctccagaaggattccggcgacgcctccaccgccggggcatgggcggcctattgcggcggaaacgtgggcaactgggccaacctgacgatttccagggattccttttccaacatcatcatcaccttccagaacggggaattgaacatttatctggacgggcagaagaaaatcacggcctccggagtcaatttcaccggagacgtgcagtcactcaagctggcgtccaccgccaatacgaccatggatgacctccaattatatgccggtgtcctgaatgacggggaaatagccgcgctggcggccaaccccgcccttcccgttccggaacccgccacggccacactgagcctgctggggctggtttccctatcgtgcatgcgccgccgccggggttaagtcccctgattttttttaagggaaaacaagttcgttcttgttttcccttttttattcactatcactctatctgttagaacctacatgaaaattaccgcactgttcttcggcgtgttcgccggctgtctctcctgcatcccggcccatgcggcggactacctctggaatggaggaaacggctcctggacggattccggagcgtggcggctggatgattcctccgccgactggagcaatggaaatacggcccaattccagacggattcctccatcacagtaggaagcggaatctctgcgtccgaaatgctttacaacggtgcggccatcacgctgaacggaggttcccttaccctgacgggcgcggctgccgggaacaacggaggttccgccactctttccaataccgggctgattctggacgcccccaatgcggaagactcctatgaagtccgggataccagcctcaccggctccgccacgctcgccaagacaggcgccggaacggttaccctggatggagcgcatacggccagcggcgtctggaacatcaacgcgggcaccctggttttcaccggggaaagaaacatcaccgccagtgacaacaaccggattaacggaaaaatcaacattgcctccggagccgtgctggatgccagcaacggccgcctgtttcataacggcgtttatacagccaatttccagtctcccaccattacgctgaacggaggaacgctcaaactgaaccagttcgggtatgactccgcctccctgggcaagctgcacaacaatttttacgcccttaaattcgcttccggaacctccagccgcatcgtcatttcccagggctatgaatccggaggcacggccagccgcggcatttacatcgccggctggggcacgacggccaccattgaactgggagccaaccagacccttacatggacttcctccaatgcgcagaaccaggatgccattgtctgcgaaaccggagccggcagtgcgctggcgctcgccatcggagaaaattccgtactctacttcaaccaggtttttgccaataaaaacacgtccggcgaatacggagaccccaccaccgccaacttctccggcctgagcctcattaaatccggcgccggagagctggtcatccagagggccaatacgatttcctccggccgcacggtccgcgtggatgcgggcaagctgacgctggaggtggacaacgccttcggcgccggcagcaatctgggcaacgtaagcatcgcttccggagccctgttctccatgaacggccacactcttgccaatgtcattgacgtccaggacggagccacgctggacatgggcggcagctcctatgccagcatggtcaactggcatgaaggcggcatcctcctgaacacggaaaacaacaagggcacgctcaacatcatgacccgagccgctctgaaactgggctccaaggcttgggcgggaagcgtgctgacggatacggataccgtttttacgctcacggcggaccagaatctgggagccctgggagcaaacgtcaactgctggacaggcggccgcgggtataacaacaccctccagagcatcaccttcacgggcggccacggaatcaacattgacaactacggagccaagtgggccgtcattctctcggaaaacgtcaccttccaggacatcggcagcctgaccttctccaacaatgccgccgacatgtccaatacagaggccctttacggcgcgggggccattgccgccaatgatacggtcgccttcagcaacaccggagcccttacgttcagcaacaacagcgtgagcgcggattccggcgcttccggcggagccatttacgcctccggaggagcctccttcaccagcacgggcgccatcagcttctccggcaactccgccatgacccacgggggcgccatccatacgggaggcaccacgggcagcctcaccttctccgacatctcggaaaacatctccttctccggaaatacggccggagaaaacggcggcgccatcaataacgattacgaaaccgtggaatggtccagcgtgggccacgtggccttctccggcaacctggcggaggcgggcgcgggaggcgccatctggtccggcggggacgtaacggtcaataccgccgcctccttcagcatgacgggcaacgaggcccgggacggcggcgggggcgccatctattcggatggaaacgtcaccttctccggcgtgggggccctgaccttttcagacaaccacgcatccacctacgggggcgccatcggagcctacggggacatcaccatctccgattccggcgccgcctccttctccggcaacacagcttatgaagggggagccctggacgcctacaacgttgccatttccggcaacaccgggacggtgctgtttgaaaacaacagtgcggaaaacgccggaggcgccatcaacctgcagggaggaggctccatttccctgacggcggaccaggcggacatcatcttccgcggaaacacagtccaggacggaagcgtttacaacgccatccatttcaacgacggcgccatggcttctttcaatgcggcggacaaccgccggatcctctttgaagacggcctcagctcccaggacgaatctgtcgtggacatcagcgtcaatgacgccgccggggccggaggcacggtcgccatgtctggcgcaaacagccagtccggcatccgggccaatacgaccgtgtacggaggcaccttttccgtcagcagcggggcaacctacggctaccattccgcagactggagcacggaagaagcgcgaacctccttcaccgtaagcggaggaagcctccacattggcgaacaggccgccctgaatgcggcggacgtgaggctggaggacggaacggagctgtccgtcatgggaaccggcagcctgaatgcagacacgctgacgctgggaaacaacgtctccatcctcggaacgggcgaaggcagcttctccatcactgccaatgccattgatatttccaacggaatcacgattgacctctcccgcggctccatgatcagcctggaactgcatgcggacaccctgacgctgggagggacgctggccttgggcgacgaccaggtggactacacctcctccatctggcagagggaccagtcctacctggtcatggatgcgtccggcgtcacgaacatggacgggactttctctgaaatcctctcctccctctccaactccgccaccatcacggtggggaatctggggctggaaggctatgacccctctctggaactggggcgctgggaactgcgctgggacgaaggaaacgccctccatctggactggatttccaatggcctggtagtcccggaacccgctacctcccttctgcttctcctggcggcaggcggcctgctcgccgtcaggaagcgcactatctaacaaccgccatctcttaataaaacatgaacagtacctttaaaacctgcatgtgcgccctggccctgggcctgtccggcgctgtccccctgtacgcggcttccgccacggcagcctgtgaacaaacgcactccatcctttatgcgggcgcggacagccaggccatcatgaagatcaaggtgaccgttacggaaaccagccagatcctgaagggaatgaccttctccatggccggaaccacctccgtctccgacatcgcgaaggcccggattttctactccggcgccactccctacttctccccgaacgcggagcaggccaaccggagggccatccccgtcctcaacaccatctccaagggggccaaaaccttccaattcgagggaagccacgcgctctccgcaggagacaactacttctggctgtgcgtggacctcaacccccgcgcgcgagggttgaacaaggtggacgcctcctgcacgggcgtggccctgctggaggactccaatgtagcggtcgccaatccttccccggaaggctgcgcggaggtgtatccctaccaattccgcgtggtgccctactaccgcaacaccaacctgatgcagtggaaccccaaccacctgaccgcccagcacttcaaatcattcacggacctcatttacttcaacgtgggatgtgacacggaaggaaacctgacggggcagaacaacgcccagttcctgaatggcctggacaagcttaaaaaccttcgcggaacggcgggcagcaagatcattctgggcgtggcccactgtgacggagggttgacggctttcacgggaaatgcggaaaaaaggcggcagttcgcgtaccagctcgtttccttcgccagggaaaagggatttgacggaatagacattgactgggaatacccggacaacggcacggagtggtacaacttctgcctgctgctgggagaagtgcgctccgccatgggagccagcggcatgtccctgagcgcggcgatcaatccgtactacctggcgcccaccagtgaaatgatggacctgctggacttcgtcaacgtcatgagctatgaccgcgccggacagcactccacctatccggacatgctcacggacatcgaagccatccgcaggaaaaacattccggactgcaaaatcgtcgtcggcctgccgttctacaccaacgagacgcgctccaaccgcaactgggacgcccagaaaggctattccaacgtcgtccagctctaccccaacatcgcccccggcacggacctctgcgccatcgacggccagcagcactactttaacggcatcaccacgattaagaaaaaatgccagtacgtaaaaacccagaagctgggcggcgtgatgatctggtgttatgatggagatttgctgctgacgcacgcgaaatccctggcaaaagccatgtattccatcatcaagcaacaggctgtccgctaatgttttgaagcatctcttgctccggcgcgcattcttttttggagaacgcgcgtttttttatgtggtcttttttgattcaaaaggattcaggggttgtctttcccaagatgatttgtaatcatttccccgaattattttcatatcactacacaatatgaacacgtcattgaaactccacggcctggtggccgccgtacacactccgttcaaggcggacggttccctgaatccttccagcgttgacgcccaggccaggctgcttgcctcccagggcatcaagctggctttcattaccggaagcactggtgaatcctcctccatgcagcttgaagaacgaaaggaaatctactccgcctggaaggaagcttccgccaagtacggcgtggacgtcatcgcccataccggttccaacagcgtctgggacgcccgcgaactggccgcctttgcccaggaatgcggattcgtggcgaccagctcccttgccccctcctactacaagccaggcactgtccagcgtctggtggaatgctgcgccttcgccgcttccggcgctcccgacctgccctattactattacgacattcccgtgctgacgggcgtgcgtttcaatccggtagacttcatcaagctggccaaggaacagatcccgaactttgcgggcatcaaattcaccaatccggacctggccctgtaccagaccacgttgaactacgacgaaaacgtggacatcccctggggcgtggacgaatggttcacgggagccctctccgtaggcgccaagggcgctgtgggaagttccttcaactttgccccggccctgtaccagaaactcatgaaatcctttgcagaaggcgacgtggaaacggcgcgcgactgccagtggaaatccgtgcagatgatcaacatcctggcctccaagggctacatgggctgcgccaaggccctgatgggctggctgggcgttgacctgggtcccgcccgcctgccgcagggcaaccccaccgcggaacagctcaaggaactccgctccgagctggaagccatcggcttcttccagtggtccatgaactaaaccgctttccctcttatggctgcaacacttgacctgaccaccctgggcgcattctaccgccgccagcttctggaagacgttctgccgttctggttcccgcgcgcttacgacgaaaagaacgggggcctctaccactgctttgacgcggacggcaccctggtggacacggacaaatccgtgtgggcccagggccgcatggcctggatgctgctgaccatgtacaacagcattgagaaaaacccggactggctcaaatgggcggaaagcgccctgaacttcctgacggcgaaatgcgtggaccctgccgacggccgcatgtacttccatgtggaggcggacggcacccccatccgcaagcgccgctatgcgtacagcgaatcctttgccgccatcgcctttgccgcccatgcgaaagctgcaggaaatgaagaatccgcaaaagccgcgcgccactggttcgacgtctttacggacatctgcttcacccccggcaagatggttcccaaattcaccgggaaccgtcccacgacgggactgggaacacgcatgattacgctggcgaccgcccaggaactgcgcaagtacctgggtgacgaggacggcttctacaccggatggatcgaccgctgcatcaacgacctccgcaccctgttcatgaagccggagctcaaggccgtgatggaagtggtgagccctgacggcgccatcatcgaccactttgacgaacgcacgctcaatcccggccataccattgaggggggctggttcgtgctggaggaagcccgcttccgcggcaatgatccggaactcatcaaggtgggctgcgacatgatcgactgggctttcgcgcgcgggtgggacaaggaaaacggcggcctgctctactttacggacgtgtacggcaagcccgtccaggaatactggcacaacatgaaattctggtggccgcacgacgaggcgctcattgccatgacgctcgcctacaagctcactggagaggaacgctacgccatctgccacgacatggtgcacaactgggccttctcccacttccaggacgtgcagcacggcgactggttcggctacctgaacaaggacggctccagggcaaacaccctcaagggcagcctctggaagtccttcttccaccatccccgcgccatgtggttctgcgcccactactgcggcgccatttaaggaaaaacaaaacatattactcttactaaaagccgtttgccaaatatgacaaacggcttttactttttatctatctttaaaatgaagataataggaaatctctgctgaaaaggcattccaaaaaaatccagtctgtttttattttcagaggatcaaaaacaattgctcctccttctgcggtgttttatgatgccgctaacatgctgggaaaagatctgcacatcttttttcatgaaatcatatatttcaagcgtgaacccaacttctaatatccatgaaaagcactcctcatgctaaataagctcaatagtggatgaagcaataaaagagaaatatcatgaccggtgaaaaattcacgttgatgcaatattccgtcagcgccgtcttggggctgatagaagcggaagatttcgttataccagaaattcagcgcccctttgtctggaaacgaagccaagtacgggatttaattgattccttatataacggctaccctacgggctatatcattacttggaagaatcctgacgtgaaaaccaaggatggaggaaaagccaacggaaaaaaagtacttatcgacggacagcaacgtgtaaccgccctgatggccgctatcgccggcaaagaagtcctggatgaagattttaataaagaccgcgtcaaaatcgccttcaatcctcttgctgatgatccgagcaagcgttttgcggttcaagacgcttctcatttaaaagacaaacgatggataccggatatttccatcgtatttgatgccgatttcgatgcgttcgagttctccgttgaatattgtaccatcaatgaaggaatcaaacccaacataatcaataaatccattgcctctctaaaaggaatcgccaacaggcaaattggcgtgattgagctggatgctacattggatattgatgaagtaactgaaattttcattcgtatcaattccaaaggaacgtctctcagccaatcagactttgtcatgtccaagatggccgcggacatggaacatgaaggcagtatgatgcgtaaaacagtggactatttctgccatctggccgtgaaacctgatttttactccttattggtacgtgatgaggaattccagaattccaagtatgcggataaaatcaagtggctggctcatgattatgatgacatttacgatcccgattacggcgatatgctacgggtatcattcatgcaccagttccgcagaggaaaacttgctgatttggtcagcttattgtccgggagggatttcgaaaccaaggaataccgggatgatatcgtagcggaatcctaccggaaactggatgccggcattgtacaatttatcaaccagcacaattttacacaatttgtaatggcccttaagggtgcgggctttgtctccagcaaacagttgaattcacaaatgacgttggattttgcttacactttgtatctgatgctgcggagtgatccaaccattccaaacgaacaaatcaaacggcatgttcaaaaatggttcgtcctctccaccctaacttcaagatacatcggatctccggagacgcagatggaccgtgatatgcgcaatatcgaagaaaaaggcttcctgaatttcaaaacagaagtggaggcctctgccctatcggaaacattttggacggttacgctgcctcagaacctggaaacgtcttctgtaaacagtcccgccttcaataccttccttgctgctcaaattaacctgaattgcaattccctgctgatgaaagggactaaagtctccgatctcattaccatttcaggagacgtgcaccatatttttccgcgcaattatctgaaaaagaacggcattgataataagacaaaatataatcaggtagccaattatatctatcttgatacgcaggtaaataaagccattggagacgatcctccctctgtctattttgccaaagtacaagagcaatgcgggactaaagccattacactcggaaatatttccgacgaagaaatgctttaccgcaatctggaggaaaacagtatccctcaaaatattgtcagcatggatataagtgattacgaatcattccttcaagaacgccgcaaactgatggcgaagctgatgcaacggtattatcaggaattgtagatcatgctcctgtaatatataaatttataaaaccggttaaggatagacgatatcctccgtccgcaccaccacgtcgccggggtccagcatggcgttaatcagggaacagaagcggaatttttttatatcctccgctttgatggaaagctcttcaatggctccgcacgccagcaggaatgcgcgcttggtgccgggaagcagaaaagtttccggagtcacccaggaggagccgtccccgaacacgacgttgctgtaccgcgtatccgtcacctgcccgtgccggaggatcagcacttcttcatcctctcccaaccccagccctgccgtctgaagctccgtccggtcctcccacttgcagaagtaatccagccgtggattttccacgcatgccagccttttcaccagccggggacggtaaggttcaaagacgggacggcgcgcctttccctgcgtatcatacgtgatatggcatttgtaaatgccgcggccttccggacccggacaggccgacagcacggaggccagatcgggaacggcggagccttccgctccgtgaaggtccatggcggcttccaccctgcgctggtgccaggggagcaggcagggaacgccatcctcccatttgacggtttcaaaaatcaaacggcacataaactttggcaatagcttcccggtattcatcttccatgtggctcatgacggtgatgccgcctccgcttttgtacaccatttccttttcatcctcttccatgaagcggatggcgacggcggaatccaaatcccgcccgttgaagaaaccgaaaatcccggtgtaaaacccccgctccatgtcctccgcctccgcaatggcccggcaggtggcctccttgggcgctccggtcacactcccggcgggcagcagcttcagcaggatttcccccaggcgggaacgccagtcttccggcaggcggcctgaaatctcggaactgcattgcaggatggttcttccgcgcgtttccaccgggctgatgtagcggtagcgcctgacttgcacatctgccgccaccatggagagatcattgcgcatcaggtccacaatggtggcggattcccggttttccttttcatccgtctccagccagtcgcaggcttcctgcgtggcggcaggagccgttcccttcatcggaaacgtggaaatggaccgcccgcgtaccgtgacaaacggttccggagagaagcagacgcagccgcggccatgcacgccgggaacacgggcgtccggccccagcagcatccggtagggagcccgtgcgaaccggaacagatggcgcagcgtcaggttggtttccacgggggtcgccacgcataaattcagcaggtaggagtcccccctcatcagatggttccggacggaggcgaaggacgccgcataccgggccatggaacagggggaagggatgaaccgcagccgttccggaagcggcggccagttgccctgctcccccatgcctcccagcggcagggaaaaagccgccatacgttcgtgccccgtttccggaagctcaaacaggaggttgtgctccagatcatgggagatcacaaagaagaacggacgttccgcacggcccagggcattcatgcggaggatggtttcttcccgtgtgtacattggcgggaattattctatcatgtgcgcgccatgagtcaaccgaacgtctggatcatcgaccaccgggattcctttacctggaatctcgcggaactcgtcagagtgacgggaatggccgttccgcgcgtggtctccaacctttcgccggaactggaacaggcggttcaggcggcagaaaaactcatcctgtcccccgggcccggaacggtggaggacgaatgccaccaggcaaccttccgccttctggaccgcctgcccccctgcactccggtgctgggcgtatgcctggggcaccagatcctgggcatacgcttcggggcccggctggaacatctctcccagccgcttcacggggtccgtgaacccatacgccggacggagagctgcccccttctggaggggctgccggaggaattccccgcaggcctataccattcctggcgtcttgccgccactccctggccggaggaactggtcgtcaccgcaagggattccgggggaaacatccaggccattcgccacaggtcccgccccctttacggcatccagtttcatccggaatccatcctgacgccggacgggaagtccctgctccggaatttcctgtctcttccggcaaatgcggttgaggggagtcctgcctcaaacgaatcaatgatccacagccagcatcagggatgaacgggaggatgccggaaagtgtctcatacctgtatcatcccggcccatatccgggccgcttcagatataacgccttttattctcatgaacgcacaggacgaactcaagatcagggacatggaaattctgttccagccttttcattcacgcaagctcgacactcccacccgcatcgttctcccggccatgacccggggattttctcccagcggggttcctacggaccaggtggccgcgtattacaagagccgggcaaaacatgaagtagggctcatcatcacggagggcacctttattgacgaacccagcgcctccccttcctccaattaccccaatttcttcggcggggcctccctgcggggatggaaaaaggtgttggaagccgttcataccacggattgcaaaatagccccccagctttggcacgtgggcatggcccggcccttcaagggagagaacctgcccaatccggaactgcctcccatcggaccatccggaattgacgtgaacacgctggaacaaacggcggagcccatgagcatcgccaagattgaagaagtcatcgacgctttcgcgcgcgccgcggcggatgccaaacggctgggctttgacggtgtggaactgcatggagcgcacggctacctgatcgaccagtttttctggaaggagaccaacaggcgcacggacgaatacggcggagacctggtgggccgcacccgttttgccagcagcattgtccatgccgtacgcaaggcggtcggcagccagttccccatcatcttccgcttctcccaatggaaaaccggccattacgatgccaagctggcgcacacccccgtggaactggaagattttctgacacccctgacggaagcgggcgtggacatttttgactgttccacgcgccggttctgggaaccggagtttgaaggttcccgcctcaacctggccggctggaccaagaagcttactggaaagccctccatctccgtcggttccgtgggactcaagggggattttacgaatgcctttgacggcggcccggaagcggaggccgccagtgtggaaccactggtggaacggctgaaagccggggagttcgacctcattgccgtagggcgcgccctgctggcggatgcggaatgggcggaaaagatacgccatgcccgtgaaaaggacatccacctgttcacgaaggaagacctgaaaacgctgaaataggaaccgatggggctccggatatgcggaaacgctgtgcccacgccctgcctacttttccctgatgcggacagtcaggtacagcagccgcagaatggccagggccggaagctgaagcgtcagcagataccacggagcggggccgaaatattccagcacggtcccggccggagcataccgggtaaaaccgtaattcgttccgagccacacgttcaccggaataatcagaagcaggtaggcgtcgcacaggcccagcgttttcacgtcatcccacggacgcgcgcgccatcccaagacgacgggaagataaagggcggaaatcaataaaagcccgtgccccacaaagaaggcgaagaacgcggcggagggaaagccgtcgtgaagcatgggggtaatcagcccctggacgctcgccgtcagcacgccgaaatacgccacggcgcacgcccagggcttgcggaaccacagggcaataaagcacaccagcgtcatcaggctgcaaaagtgcagcggaagcctgtcctgccagggctcccagtgttccctaacaatgcgcccgaacgtttcaatcaggaaggtcagcaggaagacggcgcccagcgccttcccgattagcacgcgtttttccatcctgagcctccggcagccccacaggagcccccccgcggccagagccacgacgcccagggccgcccagtgcggcaggctccagcggataaacaggggtgcgatttctccagacatacaaaatccgtcaacaggcaggaggaggttccggacacgcatgaagcttgccgctgatggattccaccctgagacgcagaacatatacggcgcggaccatgccgggggtaaaagccgcctctcgccccgtctggtgcagcatgatgcggctcagggcatggattttttcctcatcctcccgcaggaactcgacgacgccccggcccatgacgcagccgtaggcataactgtaccggcacggggtatccccctccatcagcagatggtccccgtccatctcaaaagagacctccgggcggatttgcaggatatccagcttcctcccttcccgggcgcagtggaaaaacagattcagggaaccatcccgttcttcataaccgaaattgaggggcactacgtacacctccctgccgtcccacaatcccaggcggcacaccttgaaccgggcgaccatatccagcaaatccgcgtgccggactacttccctgtcttttcttctcataagccggcagcctccatccattcattcatgcaaagcgcggcgcgcccggccagcagggttccgttccgtacggaagccgcccggagcccgcaaatatccgtcccggcggccatcaattcacaggcatgcccggtcagccactcctccatccgggaaacgtccgcctccagatgaaactggagagccagcgcatgcttccctgcgcaaaaggcctgatgcggggtaatctccgtagacgccagcagacgcgctccggaaggcacgtcaaacgtatccccatgccaatgcagaacgggtgttccctccaaatggcggagaggagacaggcgcccggcctccgtcagggatatgcgcccccaccctatttccctggccgtaccgggataaacccgggcgccgagggcatgggccatcatttgagcgccaaggcagacgcccagcaaaggcagttgacgctccagacgcatgcggaccaaatccagctccgtcttcagatagggataccgttccacatcccccacccccacgggaccgcccagcactacgcaacaatcagcccccagccactcctgaacggaaggatacggagcgcctgcctggacgtaccggatttgaaaacccctgctcctgaaaaggggctccagcgtgccgagatcttcaaaagccacatggcaaagggccaggcaggtacgggagtgagaacggctactcatggcaacggaggaatggactgcaacaggaatatagaaaaaaatcctccgggaaaagctttttaccgccttccgtccgcatttccgggacaatggaaatcacaacgaggagggaatctccgccacatcagcaaaagagccctcagccgcacggcataaatccacagggctcaattcaatctggcagcccaggcggccgccgctgaccaccatctccggcagagcctcagcgctggaatcaatcacggcgggatacttcctcttcattcccagagcggtgcagcctccgcgcacgtaccccgttacggtggtaatatccttcacaggaagcatggaaagagccttggctcccacggcacgcgccgccttcttcaaggaaagctccgcgccgatgggaatcacgaacacgtaatactgccgcggcgcgccctccgtcaccagcgtcttgtacatcttctccgccggcagccccagagcctgcgccgtatgccacgcgtccacaaactcgcggcactcataggaataatgcctgtaagggacatgcagcatatccagcaggcgcatggcgttcgtcttcgcctccttctccttctttttggacataagcttgaaccggaatgcccctgcagcatagataaaacggctcccttttacaagaccggttctctttccttccctgctggaaagtacggcgcagccatgaggccgttcatcaggctatacccacctgcttatggcgggcaacctcaggaacggcaaacaacggaggagggggaaaaggaaaaaaccgcctcattctccctgaacccttgacttgacgctgacagaaaagctaacatccggtatcatggcagatcatcacgtccggagaagcattggagaacacatcctgcgctgcttcgtcctgatcgtggcgctcttcatcatgtccctgggcatcgccctgtccgccaaggccaacctgggcgtctcccccatctcctgcacgccgtatgtgctcagcctggcgctcccgctgacgatgggaaccgtcaccatcctgatgcatctgagctttgtcgccgtgcaggcggccctgctgaaaaggcaattccgtccggcgcatctgctccagattcccgtcgtctttatcttcggcgccttgacggacttctccatgtggctgatggctcccctggaaccgtccggatacctctggtccgtaatcctctgcctgttcagctgcgccgtcattggattcggcgtctttctgcaagtcaaggcggatgccgttctgctggcggcggaaggcatgagcctggccttcgtcaaactcttcaaatgggaattcggagccgttaaaaccagtgtggactgcacgctcgtctgcatcggcctggcctgctccttcatgttcctgcccggattgacgggcatacgggaaggaaccgtggtggccgccgttctggtgggcatgatcgtccgttttttcaacaggcacgtcttctggccggacaggctgctggaacggctggcacgccccggagccgcaggagaagtccttccgctggcgcaaacagccgcttacgcgccggacgcccccctggtcatctccattgaccgggaatacggctccggcggccatgccatcggcaaaatgattgcggagcggctgggccttcaattctacgactcggaactggtctacctgaccgcctcccaaagcggccttactccggactacatccgcaagcacgaacagcagctttccagccgcttcctgcatgaactctatgcgcagaactacgcttacacggcggaggaactgccaccggaagacgccaccttcctggcccagagcaaagttatccgggacatcacggcccggcaggcctgcgtcattgtggggcgctgcgccaatttcatcctgaaagggaggcccaacctgttcagcgtattccttcatgcggaccgggccacgcgcatgcagcgcgtcactgaaaactacggggtgaagcctggcggagcagccaaagccatggacctcatggattcccgccgccgtacccactgcctgcactataccgggcaggagctgggcaacgcccgcctctacgacttgtgcgtcaacacgtccgactacggcctggaacgcacggtggaactgattctggaagccatcaacaccagaacggagcaatcccccgcctcggaaacggcccccgtccgggaacccgcgctcccggaaccggaggccgaggacatccagggagaaatctccctggcctgacaagacctgcaacagggatgtgaagccttggcgcatgccctctcctgccatatatttcccgggccttccggcaagcgtaaggcagaaagacagtttccgccgctccttttccaacagttttccactctccgggcggtcttcctccggggaaaacaggataacttgagcaattcacggccatggagcatgataccgttttttaccgttaacggcgcggaatggaaaaagaagatagaaaggcgcaaaccgggacgctcttgtttacacaaaacaagttgaaagctccctttccatgaaaaaactccttctctgtttgttgtttctcctgattccggctgtatcggaagcagcggagtccctgccgcccaccctgaaaccagaagcctagcaccgggaccatgcctacacctaggaaacgcgccatgaagccgttaaggaacgccaccggaacatcaagccggaatacgtcttcatcggagactccatcacggacaactaccgtaaggacaaccttccctgccaggactttctgcccatctggaaaaaatactatgctccctacaatgccttcaatgcaggcttcaacggcaatacgacggatgacgtcctggcaagaatcgggggcaagggaatcctggaccatgtctcccccaaagtggtccagatcatgatcggcaccaatgacacgggacgcggcaatacggaggaagaaactttcaacggcatctgccgcgtggtgaacaaagtccattccaaactcccccatgcctccattctcctggtcggcattctgcccagcgacatttacaactggcacgtagccgcggcagcctacccggataaaaaattcaaaagggatatggccgtcaatgacaggctggcacgcctctatgccaaaaatccgtttgttacatttctggacattcgcgacgtctttctggatggaaacggcaaggtgcgggaggaattattctgtgacccgtcagtcgtcgtcatcaacgggaaaaaagccggccccctgcaccccaacacggaagggcagcgcctcatggcggaagccattcagccaaccctggcacggctgatgaaaaagcattccaaacaggaatcacggagcattttcccgttctcccttccggaatgaggcatgagccagtgatgcagcttgtttgccataaagcgtttgtctgcccgtggaacaaagaaaatttatcctctgccgtccggaaaaaccttcctggacacggaaccattgacagcccagggatgacaaaacgtctcccttgaccataacaaagaacaggcattttcaggaagttcagggttccgcgcatttctcaatagccattgcctgcaactaaagaattctggaaaaatctcttgaactgaaacggcggctttctcacagaacagcctgaaatccataccctcctctgcagcctttcgtgtgctgcacagggagaatcaacgttgtgtgacctttcacagtccaaaaaaccatgagactttggtcactccacccttcctatctggatgccatcggcctgattgccctgtggagggaaggcttgctcgcccggaaagtcctgctgggacaaacaaaaggctacacccgccatccccagctcatccgtttccgggaaacgggaaatcccctacaaaccatggacctctacctgaaagccgtccatgaagaatccattcgcagaggctacagctttgatttaagcaaaatttctccttgtgcgtgccagccctcttcccgcctccttctcccggataaacagctcgaatacgaattccatcatctactgaacaaactccggaaaaggtccccccagcaatattacctgctacaacaaaccacatccattctcccccatcccctttttcaagtggttccgggcgatatttgtacttgggaaaagtacacttaaccccaacatcacgattaaaatatatcttgataaaatggttggcccaacaagcaaatgatgatgcatcattgtccatgtcgccccaccctagcggcatttttgcaacgtcatcatgtacgagagaactgtttgtgcctctaagagtgatggaatcgtttatttccatgacgttattcttgcgatgcatccatcttttgaaaagttcgccgttattttaaaaaaaggagaatgccgttcgaaagggtaaacttggacgagacctgaacaaagataaagtcgtggtgtcgacagacaacacggcagaatccgaaaagccaactaataaaagagtaggaacaacattaccggaatctgtaggctgagcgttcccatggcagaatcaaccgcttcccattcctggtaaacactaaccaattatcatgagcaatctggatacatttaaaacatacctcaccaataatcaaaatgatgaagctatcaactttctgaacaatacctattttcaaggggacaaaacctaccaactcaaagtgaaagattttggaggagaccacgcgcatgccaaaacgggaggaacggaaagctctccctgcatcacgttcaaacctgcatatttgcgtcgtatactgacaagccctactaacgaggaggaagtttttgccaagtgcatttccaccctgcgtcatgaaaggatgcatgtaacacaattaatcaaaggggaattcagaacaaaaaccccggatgaactggaattcatggcttattcggaagaattgcttccagattccgctctgcctgcgttatctgatgttatgtgggaagcggcttggaaaaaatcagacgatcattatggcaagctaacaattccttcgcaggcataccaagaccgaaagacactgattgaccagctccgcgccaataagtaaaggacaacaaaacagaatcaacgtttcaaacctgttttttatttccttaatatcatacgttcatacaagaagtggaacaagattgtctcctcaaacaacaaatgttgaaatgatatcttttgttccacttctcttccttccaccaaacactgacccccagactttcaatacggttgataaaacggaaaaggccttaaagcgttcatgctttaaggcctttatttggtggagcatagcgggttcgaaccgctgacctcctcaatgccattgaggcgctctaccaactgagctaataccccttgactttcgtcttggtgcgtcccgttgaggacgggggaaaagtatcatgacagcagcggacacgcaagctttttctgcaaaaaagatgaccatggacgattttttccgggaaatgccggaccgggaagaagttccaagccgcgcatgcccggaaacaggaacagccggaacaaatgtgtttgaataaggttcactcctgttttaccttttcataaacgatgaaacgcctcctttttcagcatcgcatgctttccgccgccgctctggcggcttttttcctggccggttccctgcatgcccaggagcctcccgcaaacacggggcaaccggcccaaacggaagacagcggcatttccactccccggagggtcgccggactgagcgttctggcattcctgatcggctggatgatttggagaagcggttcgcgccgccaaaaggacggcagccaggaccaggatattccccgtgatgacactgaaccccgggaatgacgccgtttttgaaaggttgcccctatcctttccgtagtcgttgcagggaatatccccctgccccattcattcatgaacgttattctacccatcctgagcctcctgtgcggagccatgctgacggaagcggcttccggcgtctctgacgcgggagatccttcccccggcgtagtgcaggagctatggttcggcattccgggagcatcggtgaaggatttgacgcacgggaagatttttgacactgcggcatctgcggttcacacggtcagcagtctggatgtggagaacctgggcgaccagtacggagcccgttattccgccctgctccgggtacccgtcagcggcaagtaccgtctttacctgtcttccgacgattccgcggagctgtggcttggcaaggacgccacccagaaggacatggcctgcattgccaccgtcaaggggtattccgatccccataattggagcaaccagcccaaccaggcttccgaacccgttcaactggaagcgggcagattttattttctggtggtgattcacaaggaggacggaggtccggaccatatgtccgttgcctggtccggtccggacattccctctccagtcatcattccgtccacggcactgttcgtgcctcccggcgttttgccggaagacaagctccagcctccggcagcggctgattgagaagcctgtccatttcctccccttcctgctcctctatattttttcaaggcacatgaccaatttatcattaggaaaaggagtgtttcccatgaatttccattgccggaaaaggaaataacttcccctggcatgataaaaaaccggacctccccacgtcagggaagtccggtttttctcgtcgtatatcatgtagttaattggagcggcctgacaccaaaaatgccaaaacacccactgaaaccaatttagcggatttctaatccgtggtcaagttcctaccttgaagggaaaggatttgagaaaaaattcccgatggttcaaagacatccatctgggaacggaagcctaccggtttcgtatgaaacgtaaaatcccaagggagagggaaaggaacattttccttctgttaacgtacttttcaagggccgggaggcccttattcccaggactttcctcttctttatatcctggggggatggtagcgctccccggagaagaaaggcttctctgccgaaaaaccttacagggcttatgtgaccacggattagaaatccgtcttcattccggttacttaaacgcctgcttgccgtgcggcaatttcttgtgctgctcaataagatatgtaacgaaaaggaataatggggccttagtgctcggcacgggtaatttctccggcattgaaccggaaacggcaccaggcttttctgcaagcctggtcaagatttatccaattcatttattttatgattattccataacttttttacagatattccatttcatttatacacctgttattcacattctatttacatttcttttttttcttttgtccagaacttgaacttcttttccacggcggcaaatcgtgaaatacggaaaggctatccgggaaaggaacagcagattctcgctcaagaccctccctcaacaacagaatgagaaaggcaggaaaactgttttccatcatccctcatttccactcatggcctaagaagggagaaatgccaggaagcgtttgtttccggcgccaattcctccactcctgccgccacaggctaaaattacggagtaagcttccggtcagcaatccaccattcaatcggtttcccttttcattccttgtagccttttccgcagggatttttcatctctctccctactccaaaaaaaccgttttctaaagcattgccggagtcagctacgaccacatgcccgcccaaaaggatataccgtaactgccccattatttacgggaagccaggaaaaaaatcttttccgggcaccggatatatggaatttcccgtcacctcctctttagcggaagaaggaagccagctactccctgcagcgtttgtttatttaccacaggcatgtcatcggccatcagcttcctgttcccttgaatacggttttccattcatttccacggcacagaatgagggccaataagggggattttaaatgtacattccagggaaggcttcttcagaggatgtgtgacgccaattgtccttgttccaaacacggacgaacgttagattttccgcgccgtatgaccagagcatccagaatagaacgccttgattatctgaaagaccagttgcgcaagagggtcgtcatcctggatggcgccatgggcaccaatatccagaagttcaggctggaggaggaggattaccgtggagaacgttttgcggatgcggcccgctaccccaacgacctgaagaataataacgatctgctggtgctgaccaggctggaaatcattctggatattcaccgccgctttctggatacgggtcgcgcggatattctggaaacctgcactttcggcgctaccagcatcggccagcatgattacttctggcaccgtccggaagaaggacggcgcaaagaccaggagtatttccaggaggtggtggatgcccctgaattgaaggccctggtccgggatttgaacatggcagcttccgcactggcccgccaggcatgtgacgaagcggaagcgtccgacggaaagccgcgctttgtggccggctccatcggtcccatgcctgttacctgctccctgtccccggacgtgaacgatcccggcttccgggccgtgaatttccgccagctgaggcaagcctaccgcgaccaggttctggccctgctggaaggaggagtggacatgctgctggtggagacgattttcgacacgctgaacgccaaggcggccctgttcgccattgaagagatttttgaggaacagccggaggccgccgttccggtcatggtgtccgtaacgctgacggacaaggccggacgcacgctgtccggccagacgattgaagcgttctggaattccattcgtcacgtgcgccctttttccgtgggcatcaattgcgccctggggccggacctgatgcgctcctttgcggaggagctttccggcctggcggattgctacgtgtccatttacgcgaatgccgggcttcccaacccgctcagccccaccggctacgaccttcttccggaggacatggcccggttcatgaaggagtatgcctctctgggcctgctgaatatcgtaggcggctgctgcgggaccactccggagcatatcggcgccattgctgcagccatggaaggggagcctccgcgcattccggcttcccaggagcccgcgctgcgcctgtccggatatgaagcgtacaatcatacgcgggagaagaataccctttttgtgggggaacgctgcaatgtggcgggttcccccaaatttgcgcgcctgattcgtgaagggaattatgaggaagcggtatccattgcccgccagcaggtggagaatggagccgtggtgctggatttctgttttgacgacggcctgatcgacggccccgaggccatggtccgctttcttaatctcgtttccgcggagccggatattgcccgtgttcccttcatggtggattcctccaaatgggaagtattggaggccggcctgcaatgcatgcagggcaagggaatcgtgaattccatttcactgaaggagggggaagaggagttcctgaagaaagcggcgctgattaaaaagtacggcgctgctgccgtggtgatggcttttgacgaacaggggcaggcttccaattacgacgaccgcgtccgcatcgccaaacgtgcctatgacctgctggtggagcgggtgcagttcccgccggaggatatcatttttgacccgaacgtgctgaccgtcggcaccggcattgcggaacacgccaattacgcgctggatttcttcaaggcagcaggctggatttcccggaaccttccccacacccacatttccggcggcatttccaatgtctcctttgccttccgcggcaataatccggtgcgggaggccatgcattccgccttcctgtaccacgccacgcggcaggggctggacatgtgcatcgtgaatgctgggatgctggaagtgtacgataatattcccaaggacaggctggaactgattgaagacgttctgctgaaccggaatccggacgctacggaacgcctgacggattacgctgaaaaactggccgcggagaagacggaagacggaaaggaaaagaagcccgtgctggcctggcgggagcaggacgtcgccaaacgcctggagtattccctcatcaagggcattaccgagtttgtggacgcggatacggcggaggcgttccgggagctgggctctccactgaacgtgatcgaaggcccgttgatggacggcatgaaagtcgtcgggcaattgttcggggacggcaagatgttcctgccccaggtggtgaagagcgcccgcgtgatgaagcaggccgtggcatggctcaccccgtacattgaagcggacagcaagggttcctctaagacgggaaaggccgtgatcgccaccgtgaagggggacgtgcatgacatcggcaagaatatcgtcggcgtggtgctgggctgcaacggctttgagatgattgacctgggcgtaatggtccattgcgataccattctggaccgggcggaagcggaacaggcggacctggtgatgctttccggcctgattaccccttccctggaggagatgtcccacgtggccgcggagatggagcaccgggggatgaccattcccctgatggtggggggagccaccacatccgccctgcacacggccctgaaaatcgccccccattacaagggcgccgtggtgcatacggtggacgcttcccaagtggtgcccgccgccgccgccctggtaagcgagaagaaggattcctacattgccgccgtgaaggcacggcaggaggagttgcgcaacaggcatgaaaacaagcccgtccgcgacctcctgcccctgaaggaagccagggaattgcgctggaagggagcggagggcggttatcttccccccgtgcccgcacgcctgggaccggtctccatcggcagcctgcacggctccgtcagctgcggctgctgcagtgacgacccgcgctattacgtgaccgtgcaggagctgattgggcatattgactggacgccctttttccacgcctgggaattgcacggttcctggaaccgcgccagccaggagttccggacgaaggacccttccaaggcggaggcggccgcggccctgtaccaggacgcacgcgacctgctggaccaggccgtgaaggagaaccgctaccaggcccgcggcgtcatcggcattttcccggccaattccacggccagccatgacgacattaccgtctggacggatgagtccagaaacgttccgcaggccatcctgctgacccagcggcagcagttgaacaagcagggaaagacccggctggcgctggcggatttcatcgctcccgagggggtgaaggattatgtgggggccatggccgtcagcattcacgggtccaggcgctgggcgaaggaatgggaagccaggaatgattcctaccgcgccctgctggtcagctccctggcggaccgcctggtggaggctttcgcttccatcgcccatggcaagctgcgccttttgtggaatattccggaagagtcaggggtgcgccccgcctgcggctaccccagccagccggaccaccaggagaaggaaaccgtgttcgacctgctccatgcccgggaggaagcgggcatgaacctgacggagacctggatgatgcagcccgtttcctccgtctgcgccctcgtgttctcccacccggaaagcacctatttttccgtgggcgtcaccggggaggaccagcagaaggattacgccgccagaagacaggccgcccattcctgactttcccgtttttattccgcctttcccctttatgcagcataccgaccaaatacaggccctttcagagttcctgctggagtacgccaccacgcttatgggcgcgggggtgcacaccaaccgcgccgtgcgcaatatttcccgcattgccgccgcgtacgggtacagcgcggatatgaccattttccagcgcaatatcaccatgagcctgatttgcaaggatgacgagacgctgcgccgcacctccgtccggaagctgaagcccctggcgttcaacttgaacctgatccagcagctcagcgaattgagctggctcccggtggacaacaacgtcagcattgcggagatggagcaggcgttccgctccatcgtgcgcaccaagaggttttcccgctggacggacctgcttctggtcagcgtgggcaacgccgccttctgccgcctgttcaacggggacctgtgggccatgctgaccgtgttcgccgccaccctgctgggcttcctggtaaaacagcagctttcccggttgaagtacaatccgctgggcgtcattatcctttccgccttcgccgcttccatggcggccgcgtgcgccgtcatcttccagctcggctccacgcctcagatcgccctggccaccagcgtcctgttcctggttcccggcgttcagatgatcaattccatcatggacctgatgcacggccacatcctgatgggcatctcacgcggcgtccattccatcatgatgatttcctgcatcaccatcggcctttccgcaaccatgctcatcgtgggggtaaacagcttatgagtccggattttctttcctccatcctcctggacggcctgatggccgccattgccgccacggggtttgccgtcatctccaatccgcccaagcgcgccattgccgtttccgccctgctggcggccatcggccatgccttccggttttacatgctgcattcctggtccattgacatttccagcgctacctttatcgccgccttcaccataggcatgctgggcgtcatgacggccaagctggtgaagtgcccggcggagattttcgccttcccctccctgctgccgatgattccgggcgtgtacgcctacaagaccatcctggccctgatgcagttcatgcaggagaaccaggacacggccaccatgaaccggctgattgtagagatttgcaagaacggcatcacggcgttcttcatcatcttctccctggtgatcggagtagccattcccatgctgatgttcaaacggttgagctatacccgcatcatcaagccggaacattgaccgccaaacgccggaaccgggacatttttctcttgccagactacgccccgtatggtttactacgccccgcaacggcaggaatgccagtgcaagacagccccatagtgtaattggtaacacacctgattttggttcagtatttctaggttcgagtcctggtggggctgccaatccaaccctctcttcaaggagggttttttgctgcctttttccggcgccgtttccctgcccgatttcgccagcagtgagatttcccccggccccagtgaattgccggcctgcggcacggcggttgtcctggcggaaccttcgtgaacctgcagcgcaccagggatgccaccggacgtaaggaagccgtccttcccgcatgttcattcacggccgtgcgccgggaataagggttccggcccctttagactccggacggcacaaagaaagaaaattccccgccgctgtgctgcggaaaatgttttaaatacgctagccaggaaaccagacaagcctggcggacagaaaggatagcttgaagcgctcaggaggaattaatcaagcttccattcccaggcaacggcagaatgaacatggcgggatatgatattccccccccccactccatttatttctggagaatacagaaggatttcccccttacaaaatttggaacagaaaacggaacgggcacttccggagattatccggaggagccaggggaacggagtaacggccaccctttccactttcccccgtttccacgccttccggacgagggccacgtggcatttccagacggtaaaagctcttgcgttacagggatttttttgcataatcccccggcaggaatgacggaaaaacctatacaacttgggcttgccggactggggacggtcggttccggcgtttatgaaacgctgtgccgcaaccactcccttctggaagcccggagcaagattcctttcagaatcaagcgcatcgccgtgcgcaatctggaaaaacccagggaaaccgccgttccccaggagctgctgacggacgactggcaggacctggtgaatgacccggaaatagacatcgtcatcgaactgatcggcggcacgcgccaggcttacgagctggtgacgctggccctccgcgccgggaaacccgtcgtcacgggaaacaaggctcttctggcggagtacggcgcggagattttcaaactttccgcggaaatgggcacgcccatttattttgaagcttccgccggaggcggcatccccatcatccagagcctgcagaattccctgatctgcaaccatatcaattccattgtcggcatcatcaacggaacgtccaattacatcctctccgccatgggggaacacggggccgattacgcggacgccctggtccaggcccagaagctgggctttgcggaagaagatccctccctggacgtcaacggctgggacgccgcccacaaggccctcatcctggcgatgctggcgtacggaaccaccatttcccctgacaagatttacgtcagcggcattgagaacatcaccagccgggatttcgagttcgccaggaagctggggtataccatcaagctcctcgtcgtcatccgctaccatgaagggcaggaagacgccctggaactgcgcgtccagccctgctttgtccatgactggcatatcctggcctccgtgaacggcgtattcaacgccatttccgtcaacggagacattgtaggggaaacgctgttttacggccgcggagcgggcaaaaatcccacagcctccgccgtcatcagcgacgtgatcaccgccatgcgtgaaagccgctatcctgaataccatacggggttcaatccgtatgccaagtcctgcggaatcatgcacatcaatgatacggtcaccccgtattacgtccgcttccaggtggcggaccagcccggcgtcattgcggagatagcccgcattctggccaccttcggcatcggcatatccgccacctcctccgctcccagccatatcgctgaagacggagcccagtggaacgacctcgttttcatcctccattcctgcccgtggggccagcttcagaaggccctggaggaaattgcccgcatttcctgcgtggcggcggaaccccgcgtactccgcatcgaacaccttcttcctcaatcctaacctacatcatcatcctgttacatggctcttatcgttcaaaaattcgggggcagctccgtcggcaccattgaccgcatccgcaatgtggcgcgccgcatccatgacaccgccaaagacggcaaccaggtggtcgccgtcgtttccgccatgagcggggtgacggacaagctgatcggcctggccaaagagttgtccgaatccccttgcgaacgcgaacttgacgtgctgatggccaccggagagcagcagtccatcgccctgctctgcatggccctgcacgagctgggggaaaaagccatgtccttcacgggggcgcaggcgggcatcacaaccttcggcagccatacgcgtggccgcatccacagcatcaaccccacgctgatgaacaagtacctgctggaaggcaacatcctcatctgcgccggcttccagggagccacggaggaaggaatggtccagacgctgggccgcggggggtccgacctttccgccatcgccatcgcggccgcgctgaaagcggacgtgtgccagatttttacagatgtggacggcgtgtacacctgtgatccccgcgtggtgaaagacgccaagaagatacaaaccctttcatatgacgagatgctggagatggcctccaacggttccaaggtgatgcagtcgcgctccgtggaattcgccaaaaaattcggcgtcgtctttgaagttcgcaactccatgaacaccaaccccggtacaatcgtgcaagaagaaactccctccatggaagccgtcgtcatccgcggcatttccattgaccgcaaccaggcccgcgttaccattaccggcattccggaccagatcggctacacggcccagatactgggcgccctggcagaagcggaaattaacctggacatgattctggccaataccgctcatgacggctacgtccgccagtctttcaccatgccctccaacgaactgggccgcgcccaggctgccctcaagccggtcatggccgccctgggttccaccgtgaaggtggaaacggaagcgggtcttgccaagctttccctggtaggcatcggcatgcgttcccactccggcgtgggagctaccgcgttcaaggccctggcggacgccaacatcaagaccggcatgatttccacctcggagatcaagattgccgtgatggtggacgagtcagacattgaggaagcggcccgggtggtgcacagggcgttcaatctgggcgtctaacacttcccccttttttcaggcccggttcacggaaacgtgaaccggttttttcatgtattttcccccctgtccgggacagggaggggaatgctgaaatacaaaaaaaggcctgcttcctgaaaggaaccggacggggagatgaaacatgcccgggcaacaaggaagggcctgccggaaaaacggaaagaaaaaagagtaagacgttatttgccggaagagggccggaagcgggcagcctccgattctgcggtgatcctggcgggttcgatatgaaggagtttccttatagctcggccccgatcgctctccgccatcgggaagtaaatgacgtcgtctcccagatcataggaatccaggcccgggatactgtccgccggagcaaaagattccggcgtgtccggcagtttttttacctccttggaggaggcaagggtataatacatataattaccggaatacagttccgttttaggggagctgcccggttccggtttagagaagctgaccgcagagtgtttatgggcagcccagctccactggatcaaagcctccacaggaatgtcccctcggagagattggacgacgcgggcgtagtacgttatctcctggtccgtttctaccgtcttataaataataaccgccaggagaatgtcgcttctccgcaggtacatggccgggctgtaaagagaagcatccgcggccacttcagcctgcgtgggaaaggggggggaagatggcgctgcgctggccgatacgggtatcagtccggaaagcaaacaacaaaagagtggtgttttatccatagaaatgggtagattactttctttcccattatgttcaaaaacggagcgaatgctttaaaagcattcgctccgtaaaaaagaagttgatgaattattcagcgtctttcaatgtcgcccggttgattaaccaaatggggccagtcaggaaactgccaatggagatgttgtctcccggacacattcctgcgtgaccctttccggcaaacacaataatgtcgcccggctgcgggctgcaatagcctgtatcctggccgtcggcatagtccgggtcgcccaggagcttttgcacacaagcggccatgtcccttgcacggatgatcacgtgggttttacctcccagcgcatcggcgttcgccttgtctccaatgagctccgcccctgcttcgttcttcaagtcctttccgaaggaactcagcgcgatactcatgcgcagggcgcagctgttataatagctgcgcaattgctcaggtacattgtcctcaatttccttcaggtgggcctgatagagccaccccccgatgtaggaccaaacctgtccgggattgggcatggtgacataatccaccatattgtagcatttcagcagtttttgggcatcctccgtcttccaaagattgacgggggcatcaatttcccaaagttccaggtcagccccatccatttgaggaacgaattcttccgcattgggatagggggcaatggcatccggaaccttcaggttctcatgatggagcttgacgtaatggtaaccttgcttgagttccttcttgccctccgccttcttggaggagttgccgtccttgagttccaccactttctggttgtctatttccaggtaaccgttgtcgtccatctgaatggtaaaggcatattccttatcgaaggggatacggatgtatccttcccagtcatggacgccggtttcttccgtcttgtgccagacgattttgggagcgtcttttttcttcaccttgtaacgaggattattttcagcgtcgagcgggtgaaatggtatagttgatatagccatagtgtttatgttttcaattcatttattgttgaatgaactggtcattcagtccatggtcaccttgaaagatttctctctccccatcaacacgttcaacgcgtattcggcagacagggaaagggccgaaacggcgcaggaatcaggtgaaaataaagggcatcaaaaatacaagcattgatggccaataattaaacattccaatctctccgtcccgggaagaaataaatgcgccttccgcctgcacattccggaattttgccaaaccgtctccaatacgaaatataagaggcgcctccagaaggaatatacctctccggactattgacgagtgttcatctacagggaattggtcatttttccctgtaaccatgcagaggccgcaaaggaaattcctttactgcacccgtatggtctgttcaatcagttcgttcaggcggggggcggaaacgccgccgaccatttccttcagcttcatgccttccagatacaggaccgttagcggaacggcttccagcccgtacttgcgggccacgtccggataagcgtctgcgtcaatcagcacggcgaacgccttgccgtcctgcgccgcggcgtaggacttgaccgcctgcacgtagtccgtggccgggcggctccaaggggcataaaagacaatcagcaccttgcggccggagagttccgtgagctgcctcatgtcctcccccttgtagtccatccacacgggggccttctttttaggctccgcgggggggagaacttttttgggagggtcaaacgttctttccagggggcgcggagcgggcttcttctccgcgtagcgggcgcgccgttcgctggaatcgtcgcatccggtcaggccggccatcagcaggccgctgaccaatatgaacaagccctgtttcattccgcaggcaagtatgcccggggaaggcgaatttgcaagactgaaacccgtcccgcttttcgcgttgcccccgcccccccttctctgttatggtagccgttgcatgaacggcgtccctccactggaatttgcaggggtttcccactgggcggctttggccgttcttctggcggcgggagtttgcatcatggaactggggcagtcctacaagaaaaccgtcaggaaccgcaccacgttctggctgggagtcgcctgcctgttcagcctggttccggacctggccgccatgctggcggatgaaccggaaaagagctggacgtggatgcttcccctgcatttctgctccgtcatgcaggtgctctgcgccctgagcctgtggattccctcccgcctgctgcgctccgtggtgtactactgcgtgctgtgcgccaccttgcaggggctgctcaccccatccgtggcccacgatttcccgtcgtggacgtacttcgcctttttcctgtcccacggcgtaacggtcatcacggccctttacctgccgctggccctggaatggaagccggcgcggtgggatttcctgtgggcccttctgctggcgaacgtatatctggccgccgtccaccccgtcaacatgcttctggaaaccaattacgggttcaccgtggctacgcctgcgggcggctccgtgctggacctgttcgggccgtggccctggtacctgctgtggatgcagattccggcgctcgtgctgatgtacctgctcacgcttcccttccgccattatcccagaggacgcacgggcagttccctgttccatcattgagaaaggccccaccatccgcgccagactgttcatgccggaactactgcgaaagaggaaaggcgcggactcccgattccggacaagaagggccggaacgagccttttattggacaataggcttgaggatgccgatgtaggtgtccgacgttccggttccgcgatagatggaatctatcctgatcttgatggtgtgcacaggctgcctgtagtacggcggcacgacgatctggggcgtccagtcatcccgcagcgtggcgtcaaaggtgtaattaccgttcagcgttacctggatgactttggggcggctgaacatagaataggctatgttcggatgccgccgcgcttccgtatccctttccggattggtcaccggggaaatgccggtttccagcatgatgcccagcagccgtcccggattcttgagcttgatttccagggtttccccctgcccgtctccggaaacgccttccgcccaatagccggtgccgttcttcaggttatccggggagcacggcgcgccgtaggggtccttctccagagtagagctggccgtcacatcatactggtccgtcagggttcccttttcaccgcggatggtgacctggccgtccttgtccagcacccagccggggccgggcgtcagcaccacggaggaagcatagggcctgccgtccgctcccagcagggaccaggtataaacgcctttgggcgtagtcacaatggatttggcatctgcggacgggtccagcttgacggattggttggtcatctccgagctgtatacattcacgaccgccctgggggtgcctcccgtccaggtcatcaccggagaggcgagcagcgtcagacggggttcccccatgttgaccttcggttccggcgtaatggcaatatcctgcgtataaggcacggaaaactggaaggtaagcacatgagtacccgccttgttgggaacctgggccaccagccagtgggtgattccggcaacgggggacatggtgggagcgtccgcctgaagatgccgcccttccaccagggaggaatcacatttcaaatcgtccacggacgtcacgatgtcctgcaccgccttcgtaaaaggcaggttgcgtatgggctccggctttgcggcattggcctgttcatccggcggatcatactggaacggcacgcccacggagatggtcttgcccttgacgcctttggggatgtccagcgcgcaggtgtaaatcagaaaggcctggtgctgtttcagggacacggtaacgtccagggcgttcagccggattccgtccgcctgcgtcaaatccatggggaccggcaagccgggcgccggagcaatgcattgaagggagacgttccgcgaccggggttgcggggccttttctgcggcgctctgttccttatgctgagggtctgcggccaggaccggcatgcagcacacggcgccggtcaaccagatcagggtagccaatctcatggccgttaaaataacgccttgcagcacgttcatcaaggctcatttgaggcagatggataagccttttcctcctcctgcttcccgccttaaaaaacaagggagaggccattttttaatccgtaaaatccgtagccggcaggcattcgtttcaagcccaggaatgttgtcccatgttttttaaaagggcttgttgagacttttccggaacgactttttgccggatgggtgaagagcggcgcccttgtgaaggggagcagaaggaggccgctcccaaccggatagaaaaccggcatggacatcagatgctttaccatgttattaatcaacaaaattcattcactggtaataatcaacaggaatttttacataacaggaaatacacgctgcaatatccatccatccggccccttaacgccttcttattgccgggggtttcccatgaaaaagccccctccgggagaggcgaataacgttctgcaggaaggcgcccgtcaagcaaaaaaaatggagtgtcaggcagacaaaaaaaattcacgcaagacaggagcaaaatttctcggaaaccgggataaagcacaacatgtgggatacagaaaaaaagactgtacaatatttccttttcatcgcgattatttttcagtagataatgcaaacgctacgcgccgccccaaccccgcgacggagcgctgcctcacgggatttctcccaaacgctttctacttcgcaagccatgactatagacaactcgcaaaccatactcaaactgcgtacaggacaggaaatcatcctcccccagaggaaggaccttctgggcggtctgaaattcaccagaagattttcccacaacgaagtccatccctatgatgaagtggactggacccgccgcgacgtccgcatcatggattggaagaccggcaagaccatttacgagcgcctgggcctggaagcgcccgcgcactgggatgacaacgccgtcaagatcacggcggacaagtaccttttcggcagtgaaccggggtccctggaatatgaagacagcttccgcaatatttacgaccgcatttccaacacctacaccgtatggggctgggaggaaggctacttcgccacgctggaggacgcggagattttcaacgaggaaatcaaggccatgctggtgcagcagatttgggctcccaactctcccgtatggttcaacatcggccactgggaacagtggcgctggggccgcccggacctgcgggaaagctataccggccacggcaacaaggcctaccacaccaagggcaccaagaacaacctgaagaccttcacggtccagtccacgtatgaatatccccagtgctccgcctgcttcctgacggaagtgggggacagcatggaggacatcctggatcacctgaccacggaaggccgcattttcgcgtccggttccggcgtgggcatcaacctttccaccctccgttcctccagagagcccatcagcggcaagggacgctcctccggccccatttcctttgaccgcggctgggaccgcatggccggggccatcaagtccggcggcaagacgcgccgcgctgcgcgcatggtgctgatgttcagcgaccacccggacattttcgagttcatcagcacgaagaaccgccaggaagacatcgccaaggtgatcctgcgcgagcacaacgtgcacgtagagctgaagcagattgcggaaaccaagctggtggcgggaaccccggcggaaaaagccgccgcgcgcctcattctttccctgccgctggctacccggaacagctttgacccgcacatggacgccctgctgtacggggaaacgctttcccaccagaacgcgaaccattccgtctccctgaaaggcgacttctggcaggccctcgccaacaacggcaatacctacacgcgctgggtcacgaacccggcccacattgaacagactttccgggcccaggaactgctggaagccatggcgaagtccatctgggacaacggggagcccggcgtgcacaacaatgacgtgatcaacctctggaaccccgtcaagtccatcggctccatcactacctccaacccctgctccgagtacgtcttcctgaacaatacgagctgcaacctttcctccttcaatgcctaccgcttcctgacgaaggatgaggacggcaagcccgtcttcgacgcggacgccctgacccacgccgcgcgcctggcgatggtctgcgctgacctgaacgtggaacgcggcggcttcccgattgaagaaatcgcggaaggcacctacaagtaccgcaccacgggcatcggcttcgccaacgtgggcggctccctgatggcgctgggcgttccgtacgattccgacgaaggccgctggattgcttcccagctttgcagcgccctgacggcggcctgctggacggcctccgcggagatgggagcggaactgggttcctacgtggaataccccgccagcaagaaggacctgctggccgtgctgcgcctgcataacgcggcccagaagctggcgaccgccctgcccgcccagaaggattccaagactctggacgacctgattgagaacatcatcgccaacgccggcggagtgctgccggaagcgcaggggctgaccgcctcctacgccctgcatgcctatctcaagagcttcaaggctcccaccctgatgaacaaggagcgcatcgcccccgccgccaagctggcggaagccgcctccgggatgtgggccaaggtcgccaaggctacggcgcaccgcaacgccttcgtctccgtgatggcccccacgggcaccatctccgccccgctgggctgctacgatgaaggcaccacctccattgaaccggattacacgctggtgaagtggaagcagcttgcgggcggaggctccctgaaaatgttcaaccgcctggccctggaaggcctgcgctccctgggctatgcggaagacttcgtcaatgaagccgccctggaagtggccggcctggacggcctgatttccgcgttccaggggaatatggacgccgtcgtgaaccagctcatcgtggacccctgcaacgaccaggccggacccgtgcgcctcgcgtggcgccgcctgctctccggcacggaatcccgcagcgagattcaggaaaaggtggcctatatcagcaacccggccaacatgtccgtgctgacggcggatgaactgaccgtcatcaatggctccgcccacattgagtccatcccgtggctggacaagaaggaccttccggtctttgactgcgccgccaccaacggcaacggcatccgcgccatctcccccgccggccacgtgctgatgctgggagccctccagcccttcatttccggggcgtgctccaagacggtgaacatgcccgtctccgccaccgtgcaggaagtctacgattccctcatcatgtcccatgacctgggcgtgaagtgcatcgccattttccgcgccggctccaaggcgaacgccgtttacgtggtggacacgccggaaacccgcatgttcaaggccaaccacgtctgggaacagctggtgaacgccggatcggacgccattgacgagatcatcgcggaagcctccaagccgcgccagcgcaagctgcccggccgccgcctgggccagaccgtgaagttctccgtgggcggccagctgacgggctacctgacggtgggcgtgtatgcggacggcacctgcggggaagtcttcggacgcctgggccaggtgggctccttcgcctccggcatgtttgaggcgtactgcaagctgctctccacggccctccagttcggcgtgccgctcaaggaagtggtcaagggcttccgcaattactcctttgagccttccggcttctgccgcgtgggggacgatacggaggcggatacctgcacggaaatccgctcctgcgcctccgtggtggacctgatcgccaagattctggcgtggctcttcccggaaagcaacggctaccgcctgcgggacgtgttctccatcccgagcgtcagcctgcccggccaggctccggacaccacggtgagcgtgctgcccccccgcatcatcaccgctccggtgcatcttgaaaccccggcgctgccggaggttcccgccgccggcaaggcgccggaaggcaccatgctcaacggcgcttccctgtgcccgcagtgccattccctggcctacgtgcaggacggcaagtgcaagtcctgccgctcctgcgggtataaggatggcggctgcggagaataaacggtaaacggcttattcccgtaccttctatttcaaggcggaacccggccagcttccgggttccgccttgctgatgctttccccagctccaatccatcagaatcaatcaaatggctatgtggaacccatggcgcggatgccaccggtacagcgccgggtgcaaattctgttatattcatcaagccgacagacggaggggaatgaatacggacgagatcgtgaaaacagacaattttcatgcccccgtgctgaagaataaaaagggagattacagaatgaaacccggccagaccgtgtatctgggcttctccacggattttctcatccgggaggcggacccatggcgcggcgaatgctgggaaatgatccgggaacgccgggacctgaattttattttcctgaccaaaagaattgaacggttcatggaatgcatccccggtgactgggcggacggctatgacaacgtcaccataggctgcacggtggaaaatcaggacagggcggatttcaggctccccatcttcaacaagcttcccatcaagcataaaaacatcatttgccagccgcttcttgagcaggtggacctggccccgtatttgaaccagattgaactggtcgtcgcaggcggagaatccaacagctgcgccaggcccctgaattatgaatggatcttatccatccgggaacaatgcatccggagcaaggtccattttgaattcaggcaatgcgggacaaacttcatcaaagacgggaaaatgtaccgtcttcacgtcaggcagctatgcagccaggcgaagaaggccggcatcaactgctgacctcctgcccggcgtgcggcagaaaaaagcgccgcccccacgcgttccggactacggggcaaaaaaccacccggaagaaggaatgataggcgtttgccttgaaatccggcgtaacttcattcatagtacagcgtgaacgcctgagcccgttcctctatctttccatgaaaccctactacaccctggccgatcttctggatgaagaacatccgtttgatgccggagaatccgttcccgccagactggccgtgatcggcttccccatcgcccattccaaatctcccgccatgcagcaggccgctctggatgccgcgggcatccgtgcgcgctacatccgcatccaggcttctccggaagagtttgcggacgtggtgcgcctgctccgggaaaaaggattcctaggagccaacgtcacggtgccccacaagcaggccgcctgctccctgtgccatgatacggacgccctctcccgcgctacgggttccgtcaatacgctcgtctttcaaaaggacggctccgtttccggcttcaatacggacggtccgggctttggacgcgccatccgggaagaattttccgtggacctgcgcgatttgaaggtagtgcttctgggcgcctgcggcggggccgggctggccctggcctacacctgcgccatgcagcactgcgagcggctgacgctggcaggcaggtcagaagaaaagctccaggcccttaaggacaaactgagttcctttttcattgacgaacacaggctggaaggaccatccgaccgtctggcggcccacctgaacaacacgccgcggttcaattccgccgtggcggaagcggacctgatcgtcaacgccacgtccctgggcctgaaacctacggacccctcccccgtgccgtccgccctgctttccgcccaccacctggtgtatgatttacagacgcatgacgacgctttccagatggaagcccgcttccagggagccagggtctccaacggcctctccatgctggttcaccagggggccctttcctttgaacgctggttcggcatcaagccggacatttccgtcatgcgccaagcccttgaacaaaagcatgcctgacaccaaacccgattttgacatccgggctttccggaacgcgctggtggagtggttccggcgggaggggaaggattacccgtggcgccggaccacggacccatggcacatcctggtttccgagctgatgctgcagcagaccaccattcccaccgttctgggaaggtatgaacggtggatgcgccagttccccactcccgggcacctggcctccgtggacgaacagacggccctgcgctcctgggaggggctggggtattaccgccgcgtgcgttccctccaggccatcgccagggagattgtccacgaattcggcggagagttcccggacaacccggaagggctgaaacgcctgccgggcatcggcccgtatacgtctggggccctgctttccttcgccttcaacaaggccgcccccatcgtagacgccaatgtggcgcgcgtgctggcccgcattgacaattattccgtgcctgtggattccacggaagggttgaagtacctgtggacccgcgcggaaaatctggtggatccggaacatgcccgcgaattcaattcagccatcatggaattggggcagacctactgcaggatcagcgcgccggactgcctgctctgccccgtgcgcccattctgttccgcggagcagccggaaatgctgcctgtcaagaatcccaagccggaaattacccgggtggaacaccacgacgttctctacctccgcggtaaatccatcctgctggcaagatgcccggaagggaagcgccacgccggcatgtaccgtttcccccagcgggaggacgaccataccctttccctgccccatgtgctgaaacagacctacagcgtcacccgctacaaggtgacccgctacatccaccatgtgacggaatccccggcttttctggagggggaggaactggttcctctggacaaggtgcacgagctgcccatggcctccccggaccgcaaggccctgaattcccccattctaggcaaactgctggaccaaatcagatgaatcccagactgacaccggaactggttctttccgcctactgccaggggtgttttcccatggcggacccggaaacgggagaaatttccttttacgaaccggatccccgcgccctgattccgctggacgaacgcttccatatccctcacggtctcaagcgcgtcctgaataaaaaaccttttgaactccggatggataccgcttttccggatgtggtccatgcctgtgcccggacggacgaaccggaggaacaatggatagacgggcagattgaggaagtgtacggcaggcttcacgagatgggctttgcccacagcgtggagtgctgggatgaggaaggattgcaggggggcctttacggggtctccctggggaaggcgttcttcggggagagcatgtttcaccggaaaacggatgccagcaagattgccctggtagccctggttcagtacctgcgggcccaccagttcctttttctggatacgcagtggactacgccgcatttgctgaagttcggcacgtacgaggttccggcgggggaataccggaagctgctgaagagggcgctggaggggtgaggagaaaatttggagtttatttattttaatggacaaaatgggaataaatgaacagaatgaactccatggacggaatgtctcatggatttattcccaagcatggaggataccggaatctggtggtataccgggttgcggagatcatttatgatttcacgttccggttctgcaataaatacgtgaaaaatcaaggccggacttatgaccagatggttcaggcagcccgttccggcatgcagaatatcgcggaagggagcgtggattcaggagtcagcaaagcgtctgaattgaaactgacgggaattgccaagggaagccttcaggaactaaaggaagactacctttcctatctgcgccagcggggattggaacagtgggaaaacaacagtctttacgcgcaagagctgatcagggccaggttttcttctgcacaggaagttatccggtgggtgggcaagcacaggaatttccgcccggaccattttggagcaaatacagccgttatcctcattaacgtagcccttggcctgcttgctaaattgattcaagcccaggaaaaggatttcatgcagaacggcggcatccgtgaacgcatgacccgcgcacggctggaacagcgcaaacacagaggcaaataatcttcttatttaatattttggtccactccgtccatcaagtccctttagtccatccctcccccgtctccacaaaaaagcccgtggttccggagaaccacgggctgtctattaacccttaacaaaaaaggcttacgcctgttccaaagctgcctgggcggcggccagacgggcggtcgggacgcggtagggggagcagctcacgtaggtcaggcccagcgtgttgcagaacttgacggaagcagggtcgccgccgtgttcgccgcagatgcccagcttgatgtccggacgggtggagcggccgagttccacggcgatcttcatcagcttgccgacgccttcctggtcgatggaggcgaagacgtttttcttgatgatttccagttcctggtactgcggcaggaaggaaccggagtcgtcgcggctcatgcccaggcccgtctgggtcaggtcattggtgccgaaggagaagaactgggcggtttccgcgatttcgtcagccgtgacggcggcgcgcgggatttcaatcatggtgccgacgaggtagtccaccttggcgcccttttcttcaaatacctgcttggccaccttgtcaatgatggctttctggatgtccagctccttcttgaaagccaccaggggaaccatgatttcaggcaccacggcgaagccttcttcctgggagacttccacagcggcttcaaagatggcgcgggcctgcatttccgtgatttccggataggcgatgccgaggcggcagccgcggtggccgagcatcgggttgaactcgtggagttcagccacgcggcgcatgatgacttccacgggcatgcagattttctgagccaggtcaagctgctgttccttcgtctggggaaggaattcgtgcaggggcgggtccagcaggcggatggtgcccggcaggcccttgagcgccttgaagatgcccttgaagtcgcccttctggtagggaaggagcttggaaacggcggccacgcggtcgctcttcttggtggaaaggatcatttcacggacgaagtcgatccgatccccttcaaagaacatgtgctccgtgcggcagaggccgataccggtagcgccgaaggcgatggcggtttccgtctgcttgggggagtccgcattggtgcgcactttcatcttcgtgcagtcgtcgcaccactgcatgagcctggcgaagttctggtaggtgcggctgtcttccggcttcatggtcttggagatcagcacctggatgatttcagagggggaggtttccaccttgccggcgtacaccaggccgctcgttccgtcgatggacatgtagtcgccttcattgaaggtcatgcctccaacggtgacggtgcggttgttgtagtccacgatgacttcatcagcgccgcagacgcagaccttgcccatctggcgggcaacgagggccgcgtgggaggaaacgccgccgcgggcggtcaggatgccttcagcggcaatcatgccgcgcaggtcttccggagaggtttccagacggaccaggagcactttttcaccgttgtccgcagcttccacgcagcgttccgcattcaggtagatgcggccggtggcggcgccggggccggcgggaaggccgcgggtgagcatcttggcctgcttgatggcttcacggtcaaagatgggggtcagcagctggtccacctggtccgcggggatgcggcgcacggcggttttccagtcgatcaggccctgctccaccatttcacaggcgatgcggaaggcggccacgccggtgcgcttgccgttgcgggtctggagcatgtacacggtgcggtcctgaatggtgaattcaaagtcctgcatgtcgtggaagtggttttccagcacttcgcggatgcgcatcagttcattgaaggcggcgggcatcacgtcgtgaagggccgctacgggagcaggcgtacgcacgccggccaccacgtcttcaccctgggcgttcatcaggaattcaccgtaaaattcgttttccccggaggcggggttgcgggtgaacgccacgccggaaccggattcttcacccgtgttgccgaacaccatggcctgcacgttgacggcggtgccccattcggacgggataccgtatttctggcggtaaacgatggcgcggtcattgttccaggaaccgaacacggcgccgatggcgccctgaagctgttcccaggggcattccgggaattcatggccggtgcgttccagcaccagcgccttgaagcgggagaccagttccttcaggtcatccgcggagagcttggtgtcttccacatccgcgttgccgtagcgttcttccttgatggcggcgatggcggcttcaaagggttcgtggtcttcatccgggttcttctgcacgcccagcaccacgtcgccgtacatctggacaaagcggcggtagcagtcccatgcgaagcgggggttgccggtggcctttaccatggcttccacggatttttcattcaggccgaggttcagaatcgtgtccatcatgccgggcatggattcgcgggcgccggaacgcacggccaccagcatgggcatggcttccgtatcgccgaacttgcggcccaggatctgttccatcctggcaacgccttccttgatctgcgcgtcaagctgggcgggataggtgcattcgtgatcgtagtagtaagtgcagacctccgtggtgatggtgaatccgggagggacaggaaggccaatgcgggccatttccgcaaggttggcgcccttgccgcccagaagatttttcatgctgccattgccgtcggcggaccctccgccgaaggaatagacgaatttgtcagtagatgcgctgcatgcgcaggaattggtggacatatcgattgttgtagtcgaattaatgattctgcccaaacatcaaccacaggagccaacaaaagacccgatagcgagttagggtcgagtaaggatgcccgccgcccctcgctttgtcaactcgaaattgtacggaaaacggaaatgttttttatgttttttagggaaaaatatcttccgctttttctctccgtctccgtgctcccggctgcatttttcaaagagattcccggaaggaggaatccggctcgtaataaaggatatccaccggacattccacataaatggtgccgcccgtccaacggagtaatggaagaatgatccccgggattctataattccgggtgcgggctaccgtcattttacccttgatccgcacattgggaggttccgaaatataacagatatcctgaatttgcttccttgtcacccggtcgatgtccaggattgcgcggcccgtaaaatggtaggatacatccgtggaaaaaaccagaatattggaactgaagttgctgtacccggccttgcggcatgcttcctcccccgccctctgcaattcttgcgaggctgtggaggacaaaacgttggaaaggccttttatgtgcacagggctttcctgggtaatggagcaggaggaaagaaccagcaaggagcttcccgccagaagaataggtttcatgattttgagagagaatattaaattaatccgagtttttcggaacggataagtctccgccggaagatggggttcttcaagacagctttaaggattcacgaggacgccggcagcggcggcagtccttgtaaataaaaagcggacgcttatcaaccagataagcgtccgccggaaggaatatgttttttatttttacgccttgcagaaggtgtcttcatccgcgcaggccgcctggacccacttgacggaggaatcactggaggcgatatgcaccaggcagtggtacacggcttcctggtccgcatccagccgggcagctacctgggcggcggtttccggggtggagccaagggccgcccttactttccccagcagggccaggaaggttcccgcggcctttttgccggcctccacgccgggttggtggtaggcgttgatattcacgagggaggcatagaaggagacggcgcgctcaaacagggcgaccagcatgccgagcgttttggcgttcacttccggaatggagatggtgatggaggaacggccggattccgccagcgcctggcgggtgccgcgcaggaagccctggaggaagtctccgcaggtggcgcccgcttccacttccaccgcgtccgcggaacattcccgcacttcgataaaggtggcgaagaagttgttcacgccgtcgcggagctgctgcacataggcgtgttggtccgtggagcccttgttgccgtatacggagatgccctggcagacttcgttgccatccaggtccagccgtttgccgagggattccataatgagctgctgaaggtatttggagaagagcaccagggcatccttgtaggggagaaccaccatgtccttttcccccttgccgttggtggccttgtaccaggccagcgccagcttcatggcggcgttgcatttcacgcagtcctggcgggtcttttcatccatcaggcgcgcgccttccagcagttcatccacgtccacgccctgaagcacggcgggaaccaggccgaccacggacatgacggacgtgcggccgcccacccagtcttccatcgggaagcgcttgagccagccttccgcttcagccgttttgtccagtttggagcccacccccgtgacggcaaccgcctggggcgcgaattccagtccgttcttcctgaagaagtcctgggccaccagcatgccgttgcgggtttccggcgtgccgccggatttggagatgacgacgacgagcgtttcttccagcggcagggattccagcactctgtacatgccatccgggtccgtgttatccaggaagaacatgtccagcccagcggccgggatggcgtccgccaccagttccgggccaagggcggaaccgccgatgccgatgacgagggcggcggagtattgttccgcgcggggaggcgtgattttgccgtccagaacatcctggccaaaggccttgacgtccgccagaggtccatcaatggcggctttcagttccggcgtgggagccagtgcggagttgcgcagccagtagtggcccaccatgcgtttttcatccgggttggcaatggcgccggattccagcgccttcatgtcggcgaatgccctgtctatccgcccctgcatggaggacaggaaggcgtcgtccagaggaagtttggaaaagtcaagggagatgcccagttcagggtagcgaacgagttgttgtgcgtataggctcatgatagtaatggattggaaaaagagttactggagttttttcaggatgcttttggcctgcacgtcatcctggtccgccgctttctggaaccattcccgggccttggcagggtccttgggcatgccaaaaccggtgtggtacatgatgcccatgttgtattgttccgaggcatagccttccgcagccgcccgctggcgcatatggagctgttccctggctgccgtggcggagaggcccagggcccgcgcggcatccggccacgtggcgccaaatttggaggcggaggcggcatagcccgcagcagcggccttgcggttcatttcatccgcttttttcttgtcccgcttcacgccgtatttgcccagctcagacaggaacgccatgccccagtagccgcggggactgcccagttccgccgcctgctggaagcattcaaaggcgtcttcatattttttggtgcccatggcgcgcacggcatcggagatgtggagttccgcctccttcaatccggggaattccgggatggcggcccattccctcttcagttcctcccggtcccttttggatttggggggcatgccggacggcccggaaaagcggaagagggggaaatacccttccatggctcccatgttgcccaggccggacatcaggaagacgccgggggataccctccacatgtgcatgtactggatgcggccttcctgaagggattccttggccacccattccggcatgttcgccggttccccgaatttttccgtcaggcccaccagaagagccttgtaggcggatttcaatttggtttcatactcggaaccgcggcatttgctccgggagtagaagacaacggccctcaagccgccggaggggtcatagtcaaagttcagggaaaaggtctggccgccgatggactgtttggtcttaaatacgccgttgaggccggtgcgtgaaaggagggcgtccgtgggcggcccttcaagctgcttgctctgcctcagggttttcagcacctggtccttgtccattcccacctccaggttttcatagagggcggcaagcagaggggcgcacgtaagcgcgaagagtcccgcaacataggctagttttttcatagaaaaagtaattgggcggtttcctaccagaccgggagggctttcaaaaggataaaatgcgtcagcggaggtgaggaaaatttttcataaaatattcatttccaatctatccacaatcttttcagataatcctctccggtgaagtccggaggcatgggatcatgggtcagccggaagccgggaagagcctccgccaccatcctgcggaagtccgcgtggctcagcttgcggcagttgctggtgcacagcatccagccgccgggttccaggcattcgcgcgcctgggccaccagttccccgtagtgggattccacccggaacacccttccccggtcatcccgggagaaggtgggggggtccagaataatgccgtggaaggtgcggccctgcctggagaaccgttccagccagcggcggacgtctcccttgcaaaaatactgggtggcggggtcaatgccgttcaggctgaagttttccctggcccagtccaggcacggctgagccaggtccagcgtggtcgtctgagcccctcccagggcggcataaacggaaaaggcccccgtgtaggcaaaggtgttcagcactctcatgccgggggcgctccgttccctcacctggcggcggtggtcgcgctggtccagaaagattccctgggaataaccggtggacatgtctattttgaaacgcacgccctgctccgtgaccgtaaattgcaggggaagttccggtccggctatttgcacgggcgcctccttctgattctgttccagccttttgtggaacacggggatatccagttcccggagttcgcgctccaaatccgcagggatgggacaatcccgcgtggagaccagaacacggtctcccatctggtccgcaaatacgcccgggcgcccgtccccttccccgtcaatcacgcggaagatgtcggtatcagtgggaatcaatccctttttgtaatccaggcaatggcggtaggtgcggctcacggcgggacgagactacggaatttgacggcggggggcaatgcaaaagcaatgaaaaggggggagaatcctgtgggtgcagggctgttccattgccgcggaaatggacttcatggacttcatggacttcatggacttcatggacttcatggacttcatggacttcatggacttcatggacttcatggacaaagtaaagattaagtccattctgtccatcaggtccattcactgccattccggatgaaagctccccatggagagagtccggggagctcacaaaaaagggagccggatccaatgatccggctccctgatgattgaggctgtttttccaacgagggccttagtcggcgtattgttcgttgagggcttccatgatttccttggaggcttccgggatgttggtgccggggccaaagatggccacagcgccgtgttccctcaggaagtcatagtcctgggcggggatgacgccgccgcagaagaccaggatgtccggacggccctgcttggcgagttcctccaccagggcgggcagcaacaccttgtggccggcggccagggagctcatgccgatcatgtgcacgtcgttttcaatcgccattttggcggtttcttccggcgtctggaagagcgggcctacgtccacgtcaaagccgaggtcggcataggcggaggagaccaccttggcgccgcggtcgtggccgtcctggcccatcttggcgacgaggatgcggggacggcgccccgtgcgttcggcgaagtcgtccgtcatcttgcggacttcctccaccagcggatcttgaccataggtttgagcgtacacgccggtaatgagtttgattggtgctttgtggcgcccgaagtgtttttccagggcggaggagatttcacccagggaggcgcgggccttggctgccttgatggcaaggtcaaggaggttgccttcacctgtgcgggcgcattcggacagggcttccagcgcggcttcgcacgcggcggagtcacgttccgcgcgcagcttctgcaggcgggcgatctgggcgtcccggacggtggtgttgtccacttccagaatgtccatcttggcttcctgttccagacggtatttgttgacgccgatgatgggctccttgccggagtcaatggcggcctggcggcgcgccgcggcttcttcaatgcgcatcttgggcagcccggtttcaatggccttggccatgccgccgagtttttccacttcctgaaggtgggcccagcccttgcggatgagctcattggtcaggtattccacgtagtaggagccgccccacgggtcgatcaccttgcagatggtggtttcatcctgaagatggagctgggtgttgcgggcgatgcgggcggagaagtccgtcggcagggcgatcgcttcgtccagggagttcgtgtgcagggactgcgtgtggccgcaggcggcggccagggcttcaatgcaggtgcgggtcacgttgttgaacgggtcctgctccgtgagggaccagccggaagtctgggagtgcgtgcgcagggccagggatttcgggttcttggggttgaactgcttgatgagcttggcccacagcacgcgggcggcgcgcattttggccacttccatgaagtagttcttgccctgggcccagaagaaggagaggcgcggggcgaaggcgtcaatgtcaatgccggccttgatcccggtgcgcacgtattccaggccgtccgcaagcgtgtacgccatttccaggtccgccgtggcgccggcttcctgcatgtggtagccggagatggaaatggagttgaatttgggcatgtacttggaggtgaactcaaagatgtccgcaatgattttcatggagggatcaggcggatagatgtaggtgttgcgcaccatgtattccttgagaatgtcgttctggatcgtgccggagagctggtccagcgtgcagccctgttcctgggcggccacgatgtagaaggccagcacgggcagcacggcgccgttcatggtcatggaaacggacatcttgtccagcggaatgcccttgaagaggatttccatgtccaggatggagtccacggccacgccggccttgcccacgtcacccaccacgcgggggtggtcggagtcatagccgcggtgcgtcgccaggtcaaaggcgatggagaggcccttctggccggccgccaggttgcggcggtagaaggcgttggattcctccgccgtggagaagcctgcgtactgtcgcaccgtccagggacgggccacgtacatggtggcgtacggtccgcggaggttgggggccacaccggcggtaaagtccaggtgcaggcagtcgtcgtacacgctttccgagtaggtgggcggcacgggaatctgttcattggtcatccaggtttccgttccggaagccgtggccggggcgccggccttgatttcaggataggaggcggatgcaaaatcaggaatattgctcattgaatgaaataggttggtggttgttagaggccgatcttgttctggatagcttcaacggtgttgtagcagttggccttgacgtggatgaagatatccacgccggcttccttgaacacttccacatggtcggccggataaccggcgagggccaccatcatgtccggcttgatttccttgagcgccttgcagaaggcgggaacgatttccggataggtgtcgtccgtggagcagatcacgcacacggcgcagccgctttccgcagccgccctggccgcgtcttccggggtctggaagccggacgggtaaaccacgtccaggccgccggcgcgcaggaagtcgcgggagaagtccgcacgggccttgtgctggcgcagcgggcccatgttcgcgaagaataccatcgggcgggagcctttttcctccacccaggcatcggccttggcaagcagggattcaaagcgttccgccaggcggcgcttcggcagggcttccatttccagcggttcgccgcacttgcagtcggcgccggccacgagagccttgttgataaggcaggtggagaagccttcactggcggccttgcaggcggagtccacgctcatttctacttccgggagctgcacgtccgcatttttgcagcagccgtgtcccttgggagcggcgcaggcggcgccttccggcgtttccagctttttctccgccaggttgacgtactggttgacgcccacgatggactggcggcgctggtccgccagttcatagcgcttggcggcggtggcgtttaccttcttctggatggtgccggccttgagggccttgatgatgccgccttccttttcaatgccctggaagacgtcccagattttccgggaggcttcgtccgtcaggttttccaggtaccaggaaccgccggcggggtccactaccttgtccaggttgcattcgcccagcagaatcagcgggcagttgcgggcgatgcggcgggagaattcgtccggcatgcgcacggccgcgtcaaagggcagcacgtcgatgctgtccacgccgcccatgatggcggagaaggcctgggcggagccgcgcagaaggttgacccacgggtccaccttggaaagggtccagaaggaggtgtgggcatgaagcttgattttggcagcttcctcactgccgccgcattccttcacgatgatggcccagagttcgcgcagggcgcggattttggcgatttccaggaacaggttggctccaatggagaccgtaaagcgcatgtgcgcggcggcttcattcacggagatgccgcgttcctccatggcgcgcaggtaggccacagcggtagagagcatggcgcccacttcttcaaaggaggaagcgccggagtccgcataaggcagtccgctgacgccgatggtctggaaggcgggagcgttggcgacggcccatttggtcatcaccgccatctggtcatagcaggcgcagatgcccttccccccgcagagggagcccttcatcacggccttgcccaccgggtcgtacagaacgccgcccttgaggtccgccgtgttgaatccggccgccttgtacgtgttcaggaacatggagaaggtgcccaggccgcaggagccgggcgtgatgtacacgggcagcttgtcaagctgcacacccttgagagcggtatcccagtcggcctgcttgcgcagcttcaagccgcacttgcagttgagctggacgttcacggcagtgaggccgcggtccagatcgtgcagaagcttgccgttgaaatcttccggagtggaggcgggaatgctctgggcaatttcgcagggcttttccatatagcccagggcgcgcgttccgcggcggtacgggaattgcccggcaggcgccaccggagcgtgttcatcccatttgttatagatgggatgcagagtgattccctccacaagcttggtaaaaagcttcttgtcaaagtcagcccctttcaaggcagcgacggctgcctcacgccattcggcgtatgtggctggtgcgaattctccgaagtcaacctccggagccgttgttttgtttccctgttgcatggcgaagtcaatgggtaaggcctaatatgttggtttttagtcatgcgcaaaccaggccagatttaaagcgcagcgttattttaggaaatcaaactataaagtccagcgagaaaaacactccaagcccaatgaacgcgaatttgccacatcacgcgcggcgagcttgcaaaaacgatgtaaatagcgtaaataccgggattaagcatgcccccttcaactaccgtcaaacttcctgcccagctggtcaggcagcttcactccttccgccgccgcctcagaacggttaagatgctggaagccgtatgccttgcaggcattgccgtgatcctttcctacgttctcctgtacctctccgacagattgtgggaaacgccctccgccgtgggctggattctttttttcaccgccatggccggcctggcggtgtttatcccgtggtggagcttccggtgggtgtggcagcggcgcacggaggcccaattggcgcgcctgatttcccggacggatgcggcgctgggggaccggctcctgggcgtcatcgaactggattccgaaaagtacgggcgccagtacagttctgaaaaattgaaagcggccgccatggaacaggtggcccgcgaagtgtccgcgcgggatctgacggtgaatatcccaaggcccagccacaagaaattgttcgtcctgctggccatcctggccttatgcacggcaggcgtatgcctggtgagcccggaagcggcggggaacgccctggaacgctggctccaaccgttcgatcctccggaacgctatacgttcacccagctggaccctacgccggattccctggtcattcccctgggggaaagctacctgtatgagctcaaactggcgaacgccaccaagtcccgcccgcagacggcagagtatttcttccgcaacagggtgcgccagcaggcccccctgacggacggcgtgtataaaatccacattccacccatgcagcaggcggacaggctggagtttttcgcgggggacgtcgtgcggcggctgaaaatcattccgaaggcccgcccctccctgctgggcgctacggccaccgtggcctaccccgcctatatggcgcgccccgacgggcaggaggccatgcgcgcaggcgtcatttccgccccggaaggctccacgctgacgttgaaggtgactgcctcccagaacctggcatccgcggcggacgcgcagggtaagccgctccgcgtggaagggagcagcgttgtcattccggatatccgcctggaaaaagaccccagggaaatagaactcacctggacggacagcgacggccttgcggcctcccagcctgtgcgtatgcgcctggaacccattgaggacaagcagccttccatttacctgagaggaggggagaatgaccgctacgtgctggaagacaccagcattgaattggaggtggaggcggcggacgatttcggcctccgggaaatgggggtggaatggcagggggaaaaatctttttacgacgatgaggaagagaacgccgccgctccggacccggccaaggcaggcaagcccgttcccggcctgcgcggggaaaaggttctggcggacggccatcccacccaggccagcctgaaagggatgtacctgttccaggccagggcgctgaaattgtccccccagcgcgtcgtcgttcgcgggttcacgcaggattacaagcccgggggaaaacgcgtttattcggaacccatgatcatcttcgtcctttccaaatcagagcatgcccagatgatccgcaatgaactggaacgcatcaccagcgagctggaggggatgatccgccgcatggacgccatgacggacgaggcgaagcgcctgaaaggaatggaaggcagtgaattgaaaaaggcggagtcccaggaacgcctgcacgccctggcggatgaagaacagaccaacaggcgcgaattgagcgacctgctcaaccgctcggaggacctgttcaaggaggcttcccgcaacccccagatagacccctccggcatgaaggagttcatgaagggcatctccatgctcaagcccattcccaacggccccatgaagaaggcgcagaagcagttccgggattccgcctccgagaaccgctccgaacaggagagccggaaggacctggacgacggggagagctcccattcggacgccacccaggcgcttaaagacgccatgaaccagctttccaagtccgcgcaggacatggaggccagcaccttcgtggcgcggctcaagcaggccgccgccaaggaggattccatcgcgaacgcgcttgccggccagatcaatatcattgtgggcatgaccatggatgaacttgacccctccaccaaacgggagatggaaaccatcgccacccttcaaaacgcctccacgcaggacatcggctggattctggaagacctcagctattacaagtcccgcaccggggaacgcatttacagcgacctgtacaaccagatgaacgccttctccctccgcgagaagctggacctggtgcacggcaacatcctgaacgcgattacggcccgctccattgacgaatcccgcctgtatgcctccaccctgcgccactgggccaagctgatagacgattacaagaagagccgcggcggcggcggtggcggaagcggcggtggcgaccaggcctccatttccgacgccgagttcgagttcatgctgaaaatcatccgcatgatccagcaggaacaggacatccgcatgcgcacccgcgccgccgagcaggaacaccgcaaaacccttactgcgccagccccatgaataccgtgaacctttccgccctgattctggcagtttccctgccctgcgccgccgctccggagcccgctccggaatattccgccaagcacaaggaaacggcctccaagctggccggacaacaggacgaactccaggcggacacctccgacctgatcctgggagaaaccaatgagaatgtggtggatctgctgaaaaagtgccgccatgccatgaatgacgccgtggacctgctagaggtttacaatacgggcggccagacgctggccgcccagtcagacgtgattgagctgatctaccaggccgccaaggccaagatgaccggagccggcggacaacccaagcccggaggacaggccctgatggacatgctgcgccagctactgggcatggacaacgattcccagtctgcggaacagcaggacggggagggagaaggcgaaggagaaggacagaacggctcccagaaaggcaagggaaacaatcccggacacggagcggacggaaaatccaacatggcctccacccaggagaagggtgtttccaatccggacatggctacggaaacgcgctccgttcccaaatccaccggcatgtccgcggacgacatgccctccgaattccgcaaggcgctggacgcctacaacaaaacccttcagaagtaaacatgcacgcccgccgggcggctcccgcccgtgaatgaacaataactccctttcccccatgaaaaaggcccccatcctccttaccgttcttctctgctgcatggcggccgcgccgcagaacgccgctgcccaatcctccatgagaacgtcttcccccgtgccgccccaggtggagctgatgtacgtgaagggactccgttacctccagaacgcccagaagacggacggcacctatgatggcacctacgggcaggagcccggcatcatcggcttctgcctcatgtccgtgctggcccacggggacgacccgaacacggggccgtacgccaccatggtgcgccgctgcgtgaattacatcctttccaagcagaacaggggatccgggtacattggggattccatgtacaaccacggtttcgccacgctggcgctggcggaggcctacggcatggtgagggacgaccgcataggccccgccctccggaaggccgtggccctgacgctgaccgcccagaagaagaacaagacgggaggctggcgctattccccggagtccacggatgcggacagcacggtgaccggctgccagatcgtctccctgttcgcggcgcgcaacgcgggcattcccgtgccggacgaggcctttgaacgcggcctcaagtatatggcttcctgccgtgacaagaagggcgcctacggctataccggcccggcgggcccccgcgtcaccctcaccgccatcggctccctgacgctgtccctggcacgcctcaagacggacccgtccttcaaggattccctggcctacctgaaaaagaacctgaattaccgggattcctcctacccgttttattttgagtattacatgtcccaggccctgttccatgcggaccaggaggtatggaaggaatggaattacaagaacatgcgctacctgggcgcctcccaggcacccaacggttcctggctctcagaccattccgcagcgtattccacctccgcggccctgctttccctggcgctcaattacagatttttacccatctatgaacaatagaatccgcctttccctcctgctggctccggtctgcctgctgaccgcctgggccaattccgtcgtagacgtggtcacggacagcaattaccgcctccgcggggaaatcgtctcctacggcaaacagggcatcgtcatcaagcacccggccatgcgccagaacgcggtcatcctcccgtcggaaatccgcgcgctttatttcacaggcacctcctccccggacctgcgagccagggacaagattttcatggccacggggcaccgggatatcatcccgtgcaacatcatctccatcacgcaggacaaggtgcagtaccgggacatgctgggcaacgagcgttccatcccccgcgaccaggtggccggcttccggctggatacgctccaggaaaagggcttctggcaggaacccctgattttcgacaacagctgggtttattccggcaaccgggaggacgattaccgcacccagtccggaagaaaactgatgaacgccctgaaaccgaaaatccagggagacaagtaccaataccggctgggcaacagcgactaccccacctggattcccctgtacaagaacatcggcctggatccttcctccttcaccttccgcaccaccatgacgatggacggcaacaacgaccgcgccggcattgtcttctgcttcggagggaacgagaacattcccttccggtccaattccggcagcagcctgaacaggctcatgctcagcatcgctcccggcaaatgcacccttctccgggaacagaagtccggcatcatcgtgctgggggaagtggacatccccacccctaccctgacggaaggcgtggatatcaggctgacggcctcccggcagggagagaacgagcaggtttacgagctgctggtgggagacctgccgcccaagctgatgacggaccccagtcccccggaacaaccgttgcagggggacgccttcggcctccagatggaagggcacgtctccctgaccatcagcaggctggccctttcctccatcaccctgagcgccaaatccgtgaccaagaatggaaatgccgcaacggaccttgtcctgacgaaggaggaggatgccattcccggttccatcagcggctacaacagcaggaataagacgctgactctttccacggacaaggaatatccgggcattccccgggagctttccatccccgccaagtatctggataccgtctttttcgcggaacagaacaagaaggacgattcccgctctgcggcatgccacagcattctgatgaaggacggctcccgcctgcacggcaacatcctgagcatggattccctgagaatcatcctgcggcatccgcagctcgggcagatttccctgcccctgaaaaacatcacccgcgtggagtttctgaattccgcacagccatcccgctccaccccctgatatatccgccatgaaacaagcaataacgcttttcctgggtgcctgcatcctgctggccgccgcccttccgcccaccgcacgggcggaaggggtcattacgcttaaatccggggaaaaactgccgggcagcctggacacgctggacagcccgtacctgaaagtccgctccagcattctttccaaacctgtggatgtcaacctggaggagcttgacgagctggtttcttcccgtccgctggagataccggagcagttttccgtcatcaggctcgccaacggggacgagttttacggcaccctgaaggcgctggatacggagagccttcaactgcaaaccgcgtggggcggcctgcttcccgtcaacaggaagtacgtgcggcacatcgggttcgactcccagaaagcctacctgcgcaacgcgacggaatccctccagggctggaagtcctccgccaacagcatgctcccggaatgccgcaacgggtactggatcatgcgcggctccaacaatacggaactgcaaacctccttccccatgccgtcccgcctccatgtacagttttccctttaccataccaatacattccggatcaatctctccctctggcaggactccaactccggaagcagcattgacctgggcctctccctggaaaaggcggaactctccaagaatagttccggccagtaccggacgctggggagggtgaaaaggaacacggagcggaactggtatgccgacaagagcgtcaagcgttccgacgttcatttttacgccgacccggaaaaaggcaattactacctgtacgtcaacggagaacaggttggccggtgggaagaggtcaaggacatggacaatatctttgagaatgaaagcggggacgatgaggaagaagacagggaagcctccaaaaagcatgaattcaaaccgggcaacactcttgccgtgagcggttacgacggcttgaacatggccgtgttcaacctgaacgtgtttgactggaacggcgccctcccccacctggcggaggaacaggacatcatttccaagtacgacacggacgcctccagggacaaggccctgctggtgaacggagacgtgctccggggagccatttccctccaggaaaacggctccatccgcatcaagtcggaccactatgacgtgaccatccccaccgccaaggtgcgcgccctggaccagaaaagccaggaggagaagaaactgccggaggacggcgcggacacccgcgttttcctgacggaccagagcatcctttcactgaacctggagaccctcaggaacggcttcatggaagggcgttccgcagcgctgggaaaagtcagaatcccgctgaaatccatccggaaagtccagttcaacctgcaaagcccggagctccggaagcagagggaaacgccgttccggaacaggtaaaggcgcgccgcacgcgttttagccaatccggttcccgggagcgtttaagagcgcatgcgtcaatgctcctccatttcctccgcccgccgcacggcgctttccaccgcctgaatccaggcattgcggaatccgcattcgtccaacgcgttcagggcggcaatcgtggtgcctccgggggaagtcacctcatcccggagcgccatgggatgcttcccggtctgttccagcatgagggcggacccccgcatggtttccacggccatttccagggcggttttcctggacagtcccatggctacgccggcgtccgaaagagcgtccagcaccgtaaacatgtaggcgggcccgctgccggaaatggcggaaacagcgttcatcctggcttcctccaccttgtagacggagccgcagccggagagcagccgccgggccgcctcctcatcttcatccgtcacggcggctcccgtgctgtaggcgatgaccccggccagcaccatgcacggggtattgggcatggcgcgcacgatgcgcgttccgtcgctggcgcaggcttccatgtcatccagggagatggcggcagcgatggagatcaacagcggcagctcctccccccgttcggaaagggaggaaatgagggaaagtacgccgtgcggcttaacggccagaatcagggcctccacagcgtccgccgcatccgcctccgtggccgcttcatgcacgccggggtattcctgctgaagggcctgcacgttttcatggtggtggtcgtacacccagacttcctccggggacaccgctccggctttcagcatgccgcgcaggagggcgccgcccatttttcccagtccaatgatacctgttttcatggttgatgattttcttgcggtcaaaaatataaacggtttatagaaaataaagatattaattacaacctgtgaaagtgaaagataaacttttgcacctgtttcctccagctttcagtggcaaattattcgtaaaaattgtaaacggctaatctccagtctattccgcctgatttgctttgcagaagcagccttccacatggtcgttcacaaagccggccgcctggaaaaaagcgtagcacatcgttgaaccgaagaatttgaagcctctctttttcatgtctttgctcatggcgtcagattcgggagatgtggcggggatttggcttagggtcttgaaattgttaacaacaggctgacggccggggaagaatgaaagggcatactggtagaaactgccgaattctttctgaacagccataaacagtttcgcgttattgactgtgctattgattttcaaacggtttttgacgattccatcaaattgcatcaaccggtcgatgtcttccggcgtcatttgcgctactttctccacatcaaagccatggaaggcttcccggtatccttcgcgtttccggaggatagtaatccaggccaagcctgcctgggcgctttcaagcaccagaaattcaaacagggttttgtcgtcggtaacgggtttgccccattcttcgtcatggtattttatatatagttcgtctgttccggcccaaccgcaacgtgcattgatgatgtcttccatacttttccaggttaaaattcctttttcctgaacagccatgcggccagcgtcatgtgaaagacgaagtaccccagcgtaatcagggccagactgccgaacagggaaaggggaatggtctgcccgttcagggcggaatccgttacggaataaatctggaaattcggaaagatgagggcaaacagcctgctgcccgccatttcccaccaggagatgcctcccgttccggagcccacccacagggagagcgcctgcgtctggaacagccccgccagatagaccatgaacgtcagcagcgcgctgatgatggttccgttcgtcatgcaggacatcagcagcgtgagggaggagaggaccacgaattcgcacatcatgacgcccaggcccgtctgcacgttccaggtagcgccctggaggcggattctgtccaggtacggctgcatttcctccaccgtatagcggcctttcagggaggcgatctgctccgccactaccgtatccgtccgcagccacagcaccagcgtcatcacagcgtccatcagcagcacggcgatcagggtgagggccagcacccccagcaccttccccatcaggtagtcgatgcgaggaaccggcttgcacaggatggtgtacaggatgcggtcttccgcgtccttggggataatcagggccgtggccgccacgcagaaaaagaggccgaacacccgcatggcgccgtaagcggagtttttcagcagaacgagttcattgattcccccggtttccggccccagcaccgcgctcaggcggaaggagctcagggccagcagagccacggcaaagaggcccagaaagagaaacaccttcatccgcacgagctgcgtgaaggtggtaccggcgattacggccatgcgcctgggcgaaggtatataaccggaggtaatccatgccatgcggaccatcttgccgtattccggaacaaataaaagagctttttatttcatgtgctgaactccttccgccttgaagaagcttccctcccgtgttctcatggggcgcgtatgagtctacgatcccagttggaagaattgcttccggaacttttgccttccgacccggcccaggccatcaaggggaccgaactcatccgcctggtgcgcctgaggctgggtgaggagtattcagacgcctccctgcgctaccatttctccttcatggcctccgagccggactcggaaatcgccaaggtggagcgcggccagggctattacaggcgcgttcgggaccgggacggcaaaccggcggccagggggctgctgcccctgtttctgggggaaaacgaaccggacgcgctgaactgccgcgccaaggcgctggccctggccgtgcgccagtatgataccacgggccgcggggttttcgtgttcagcaccagtgaaacgggaacctcatgggtgaagccggacctggccgtcgtggaatggccggatggggaatgggaggggaacgcgctggtcttcgaccaaagcgcgcttcagcgccgccgcatgatcggagcgcccatgatgggcatccgcagcgtctgcgtggcccgcatgcccggaggagaagacggcaggagggagtttttcaggaccctggccacgtcccgctgggcgcagtgcggggaactggtcatcgtgggggaacttccggatgattccgaatgcgccgcgctgcgcggactggccgccgaattcggcgtaggcgtcgtgtgcctggaaattgcagacgaacgcctgtgcgaactgccgggggcggaagagattttcaaggcaggggacgaggaatgcgccgccctgctggcggagctgacgcccgtgcgcctggcttccagccgcctgaaggcgctggaggccgataccggggaaaccctgggcggggaattcggcgccctgttcgactggctggccgcctgcctggaacgcggcagcgtggaggaatatgaattccgggtttcctgttattgaatacggcagagagattcttgacagaacttgcgtattgaattaaagattttcccggccccaacccgccctcccccctgacatggaacaagaaaccctggtttacccgcttgcgaacaataccgttctgcaagacaagtatacgatattgaatgtgctgaacgccggaggcttcggcattacgtacctggcgctggacaatccccattcccggtacgtcgtcatcaaggaatgcatgccggacgcctacgcctaccgggacatggaaaccggcttcgtccacccgcgggacgaacaggccgccgtcaacttcgcccagagcatttccaactcccggcaggaggcttccgtcctggcccagctcaaccaccccggcatcgtacaggtgttcgacatgtttgacgccaacggcacctgctattacgttatggaaaacatccaggggcagaccctgttcgacctgatgaccaccatgcacgccaccggacagagcatggagccggcacgggccacggaccttctgttccgcctgctggacatcctgcactatcttcacgccatgggggtttaccattgcgacatcaagccgggaaacatcttcatccagccggacggcacgcccaagctgatcgacttcggcgccgtgcgcaccaagaccctccagcaccagggcctcgtccagatcactcccggctacacgccgccggaattctaccccggacgccggagcgaaatcggcccctggtgcgacatgtacgagctgggcgccacgttctacgaattgcttacgggccaggttccccacccggcggaccagcgttccgtggtggaccgcaacccgaaggtgaccagttacgcggccctgcggaagacataccccatgaacttcctttccgggattgacaaggccctgtctccggatgaacgcagccgcttccattccgccaaagcatggaacgattacatcaacgccatggcggccgcaggaaccctgcaagccggaggagtggcgcggaaagccctgcccaaggccagaaagaaatcttccgcaggcaccgccttcgtcatcatcctgctcatcgcggcggcggccgtctggatatgctggaagcagggcctgatcaatttctgacccccacctcccgttcatgctggacctggcggaagaactgaaggcggcggccgcggaggggatgcagctcccttccctgtgcgtggacccggcgtccatcctggccgtgatggtcaatgaagtggttccggaatgcccggaagacgatttttacgggaacgcccccgcgccgctgtacctgtccaccgccctgcccctgttccgccggggcggcctcccagcctcttccatccgtgacgtgacggaagccggcatttacatcaccaacgccgtcaagaggcccaaaagggaaagcgcggtgccgcaggaaatgattgaagagagcctccccgtgctggaacgggaattgtcccttttcccgaatctccgcgccgtgatgctgatgggggatgtagccaaaaaggcgttcaacatgattgcccgcagcaagacggggaagagcgccattcccgccggctccacctacaagctccgcaggacgccctttcatgccatggggctccgcattttcccgtcctacatcatgacggggcgcaatcttctgattgaaaagtcaaagacggccatggccgcggaggacatccgcgccatgctcgagtttatccgcagccaggagctctgaaggcgcttgcggccatgaaaccggatggagaggaagagagccctcttttaaaaacagatgcggcctttgtccgcattctgatcaggttgccgcgcaggcatgcggctctcctgcaaacgccgggagaaattccgccatcaattaataatctaaggtattctattgcgccagggagtgaaggagcatttcagattcatttgccctgcgggcttgaaatttcgctttccgttctaccgggcttgtccggatttccggcctcttggccgaatccctttccgcagcgcagcaaagggaatttttttacccttttcatgttccgttcggagccgataagggcggcagccccttattttcagcaacgcgacagtgggaaaaataacggaggaaggacatatccccggcatgcccgctgcatctttccacgcaggaagactttcatgacggcaagggccgaaccagacggttcagcccttgcaaatggttgagaactgagaaaaggcgcttacaggctttccccgaagtcctggcggtacttggccgccagtttttcaggccagtcgctcttggcgcggagcttgcccatgaagaagcgcagcacgggcggttcctccacgaattccaggccgccgatcaggtcgcggttgtcgtagagccatttcatgcggtccgccacgtatttgacctgggacagcgtgaagacgcggcgcgggaaggccaggcggagcagttccacatccgccagaatgtcgtcgccgttttcgtcgcggacgctggagagcgtgccgcgttccatcccgcgcacgccggaggcgatgaagaaggccgccgccagggccccggcaggatagtcctcctgcggaatatggggcaggaagcgcccggcgtcaatatgggcgcccaggccgcccgcgggggtcacgcagggaatgcccatgtccaccatctggccgatgaagtattcaatgaaggaggggctctgggaaatcacggtcaggtccgtggtttcatacaggcccacggccatggcttcaatttcacgcacggagatgccgccgtaggtcaggaagccttcaaacaggggaaccaggtgctccattttcttggcgatggagcggtcgttcgtgcagatgccgccgccgcgggaggaggaaaccttgcgggcggagaagtataccaggtccgccaggccgcacatggttttcaggatgtcagcgcaggaggagtccttgaactcgtcttcacgcatcttgatgaagtaggcgttttccccgatcagggaggcgtccagcaccagcatgatgccgaattcgtcgcaaatgccgcggatttcacgcatgttggcaatggagaaaggctggccgccgattaaattggtggaggcctccatgcgcacgaagggaattttgtccgccccatggcgggcgatgcagtcgcgcagcttggcggggtccaggttgcccttgaaggggttggtgctgaccgggttgacggcgtcatccgccaccagttcctcaatcttgccgccgttcaggtcaatgtgggcgtgcgtggtggtgaaatggtagttcatgggaaccacgtccccgggcttcacgaaggtgcgggcgatgatgttttcacaggcgcggccctggtgggcgggaagcaggtattccttgccgaagacgtcccatacggcctgcttcaggcggtcaaagctctgggaaccggcataggcgtcgtccgcacggaacatggcggcgatctggttgtcgctcatggcgttgacgccggaatccgtcagcatgtccaggtaaacgtcgttcgtgctcaactggaacgtgttgaacccggcttcctgcgcggcttccagacggcgttccacggggacaagatgcagcttctgcaccacgcggactttatgcagttccaggggaatttgttccccattgtaaaatttgacaacgttggatggttctgaattcataaaataaaaggtgaataaaagtgtagcagaatgagtcctttccgcaacataaaagacaccccgcttctttttctccccttccggaaaggcaggaatgccgctggcaggaaaaatgtggaacttacgggaggaaactcctagcgtgaactcctatgaaagaacactggaaattgattcaacagcatctgggactggatgcggacggcatccccggtccccggacggcgcaagccctgatggaaaaactgggcatccgccagccggaacattcctggcccagccaggaggaagtgcgctccgggaagtccgtcttcggccgcgcgggggatgaaagcaacatgaccagtatccggctgccatacatcatgcgactggcatgggagaggaacacgaccgtttccaccatgcgctgccacaagctggtggcggaaccgctcctccgcattttccaggccaccctggaccattacggcatggagaagatacgggaactggggctggacctgtacggaggctgcttcaacaaccgctccatcatcggcgggaaggccacgtccatgcatgcctggggcattgccgtggacatggacccggacaggaacggcctgaacatccctgcaccgaaagcggtactgtccggaccggagtacgcggccttctggcagttcgtggaggcggagggggccgtatccctgggacgcgcacgcgattacgactggatgcacttccagttcgctactctttgaccggagcggacgggtccgtgcgccagccctcctcccagcggcggcggagggctgcccagtccagcccttccccgccatgccccaggaaggagcgttttttcagttcacggaagttttctccgggcagatggagcagctccccccggtcataggcgtcctggtcgcacatgccgttgaagaggggcgtccactgccagcggcgcacgcccaggtagttcttgaacgtatccaccagctccgtcgtgcagttggcggtgacggtgttgtagtaacgcgggcgttcatggaggctgttgattttctccgcaaagcccaggaaggcctttttcaggttttccctgccgatgttgatgcggtacaggtacatgtcctccttccggtaggtggtgcgcaagtcgaacaaatcttcctcgtccgccaggatgtaaatcacgttgaactgcttgtagaggcccggaacggtcccctgctccaccccttccggcaggcgcgtctccacggacagggccaaatgcttcccatcctcaaagccgaaggagagcatggtgtgggctacaaattccattccgtcccagtggctcacggcgaagtccagcgtggccagcttgtccaggtcaaagcggcgcgtcacgtagcgcacgtcaaagtcccgctccgtccggtaaacgaagctgcgcacgtccttcaccaggatttcattcccgttgatttccacggcgggcaaccggctccaggacggctgccattccttgccgttcgtcgcaggaatgcacaggtagtacgccagcagcagggccagcacgccccaggaggcgcgccagaatacgggccgctttctgcggaagatgaaggcgcacgccatggccgccaggtaaagccacaccagcacggcgccgccccatacattgtaaaataccacgcccgccgcccatacggacaggccgaaccatgccgccatcatcagaacgcgggcggcagccaggcccgcatggcgcagggaagtcaggtgcatgggaaatgaaaagagaggccgcgcgctccggttcatgaaacgcgcggcccgttgacgggggttatctgaaggaaaggccctttaccttgtccgccagggctttcagcacgcgctggtgcgcggcgtccacttccgcggccgtgagggtcttggccggatccctgtacaggaaggtgtaggcaatggatttgcggtccgccgggagcttttcaccggaggggtccgtgaatacgtcaaagcaggagtagctgacaagcagtttttcccgtgcggcttcaatggctttcacgatgtccgcattgggcgtggaaaggggcagttccatggccgcatcacgggaggagccggggaactggggcagttccgcggccttcacgggagcggtgagaatttcctgcatcttgcggaggtccagttccgccacgtacacgggctggtccaggcccagctcccggcaacgcgccagggacaggcgggcgaagtagccgcaggccttcccgtcaagctgcacgtccgcccccagggcggcctgttcgcgcggtttggcgggggtcagcgtaaagcggtggcccggagccagcgcttccatgacggccagcaggtcttcaaaggaggcctgttccggcctggggtccgcccaggagcgcgccgtgcggtccccggaaagcaggatgcccagggtatccgtttcaatgtccctgcccttgccgccgcccgtattgcggaagacgcggccaagttcaaagaagcgcaggccggagacgccctggttgctgttgcgcacggcggcggcaatcaggccgggcgtgtgcgcggggcgcagtacggagtggtcctcgctgagcggcagggacacgcggatgaggtcgccgtcctgcagggggcgcaggggtagcgcgtccttcacctgggcgatggcgccgtcagcggcttcagaggcgatgagcttgatggtctgggtttcatagaaccccagggccgccagcttgcggcgcaggcccatctggaagttataggccacgtctacgggggattccgtgacgaaggggccggagaagcgggacgggatgccgtccagcccgaagacgcggacgatttcctccagcaagtcgcaggggcgcgtaaggtccaggcggtgggaggggatcagccagcattccggggcgtccggaacctgcatcaggcccagcgccgccaggatgcgcgcgccttcctcgtgggaaatggaaccgccggacatctggtccagagccttccagggaagcttcacgaagcccagttcattggtcaccgtggcgcccttcccctgcttcagggaagcgaacgcggaaacggggccgtccggctccccgcaggaaggcatgcaggcatgggccggattcgccacgggggcgccggccacatacgtcttggaggccgtgccgcccgccagctggagaatcagttccacggcgcgcacggaaccgcgcaacacgttccaggcggaggtgccgcgttcaaagcggtaggaggagtcggaagacagggccagcctgcgggacgtggcgcgcacggaggagggcttgaaccaggcggattccagaataatgtccgtagtggcttccgtcacgccgctttcctccccgcccatcacgccgccgatggcgagcgccttgccggactggtccgcgacgaccaggtccgtgcagttgagggtgtattcctgcccgtccagggccttgaaggtttccccttcgtaggcggtgcgggtgacgatgccgccctgcaccttcgccgcgtcaaacgcgtggaggggcgtgcccagttcatgcaggacgtagttggtgacgtccacgatgttgttgatggggcgcaggccgatggccaccaggcgttccttcagccattccgggctttcctgcaccttcacgccgctgattttcacggcggtgtagtacgggttcaggtccggctggtccagccgcacgaagtccccggcgggttccagctccaccccggcgtcatcaatggaaacgggcctgtactcccgtccggagatggcggccagttcatacgccatgccgttgtgggaaagcaggtccggacggttgggcgtcacttccacttccaccatcgtatccgccttgacgacctgggagatcggcgtgccgggttccagctcctgcggaagaatccagaggccgtgctccttgtcgggcagccccagttcggaagcggagcagagcatgccgcgggattccaccccgcgcagcttgcccaccttgatttcaaagttgccgggcagcaccgctcccggcagggcgcagggaaccttgtcccccaccttgtagttctgcgcgccgcacacaatctggtgcagcgtgccgtcgcccacgtccacctggcagactttcaggcggtccgcctggggatgctgttccgcggcagccacgcgggccaccaccacgtacggggagtccacgccctgctggcggatgtcttccacttcaatgccggcaaaggtcagcatgtccgacatttcgtccacgctcaggccggccaggtcaatatactgggaaagccagttaagggaaattttcatatctgagtaaggtaaaaattattggaattgggcaaggaagcgcacgtcgttctcaatcagggcgcggatgtcccggatgccccagcggatcatggccaggcggtccaggccgatgccgaaggcaaatccggtcagccccgtgtagcgggcctgcacgccgggttccagccccagttcgcggtccacggcttcaaagacgttcgggtccaccatgccgcagccggcgatctccacccagcgcggttcttggccgtccaccttcagcttcacgtcaatttcaaagctgggttccgtgaacgggaagaaatgggggcggaagcgcacttccgtatcggagccgaagagggcgcgcaggaagtattccagcgtccctttcaggtcgcccacggaaacgtccgtgtccacatacaggccttccagctggttgaaggcggaaaggtgcgtggcgtcaatctcgtcacggcggtaggcggagccgggggaaatcacgcgcacggggggcgtctgcttctccatggagcgtatttgcacggtggaggtgtgcgtacgcagcagcttgccggaatcaaagtaaaacgtgtccttctcattgcgggccggatggtcctccggcgtgttcagcgcgtcaaagcagtggaactcgtcctcaatctccgggccgtccgccagggcaaaacccatgtggcgcagaatgcggatggcttcatcccgcacgatcgtgaggggatgcaggccgccctgcggcagggagcgggccggaagcgtcaggtcaacgccggccacggcggccttgtccgcctgggcctgcacttcctccagcttggcgtccagcgcttccgtaatagccttgcgggcctcgttaagcaactggccgacggcgggcttttcctccctgggaacgtccttcatgcccgtctgggccatggtcagttccccttttttgccgaggatggctacgcgcgcgtcttccacgccgcgcctgtcagacacctgggcgatgcgcgccagggcatcccgttgaatgcgtacaatctcttccttcataaaatttgacgggcaagagcttacccgtcccccccgccagcgtcaagcccttcggagggcagatcacaaagtcattgcacctgattttgaaaagatcaaactttcattgtttccttcatcattggaatcatatagttcctcttatattattttccaaataatatcacaataaatttatttttattcaatatctatcggtgatatatggatggaaaacgatcattaattggaagatatatatcctaatacagtcaaacataatccaatgcaccatattgcaacacacaaaagaggcaaccatgtaccaagaagagaaacaactttaaaagaacaatgttttctctcttttaagcatttatctgttacagagaatacatgatattcatcaagattatgtaatattttaagaacgatatccaattttatgtaaattctgtaaacagaaaaccacaataacgattgaattatcacgccaataagtagtatccatatgagattagcattgctccttactgttacagctgccattagaattaatgaaaaaataatgaaaaaatagtttagtctagtacaaaataaattctccataaactctctttcttcataaaaagtccaatctccattttccctttgtttttcataaaaccgaagaaaatcggctttggaaagagtggatggttcaagtagacaagaaatacgcgtactcattttttgattatcgtctttcatacagtatttttcgtatctcttatttaatagcaaagaaatataatttttcaagataattttttctatttcccataaagtcggaatagatgaatctaattcatcaggtcataaatagaaagtttggaaatcttttaataaaacaaaatattacagaaaaaattataaatataataaaaaaccatttataaagtcactaattttcaattaacaatttacacataccccggctgggcggacatgcggccggaaatcatgccgagcacgcagaaaaaggtataaaccaggcagaacggcaggaaggaaccgccctggtggaggaaggaggtgaacagcaggctcagggcagcgcccatggtgaagccgatgccctgggacatgccggaaagcctgatcgcctccgacggggttctggcccgttccaccatcagcgccattccgcggctgaaaacggttcccgtcgccaggccgaacagaatggccatccagacagcccagtccagcggaagatacaggatgccccagcaggaaagagccgccagggccatggccatcacgatgagaaggccccggccccccgtggctttttccagagcgtgcgcggagagcgtggcgggaagctgggcaaacatggctacggaaaggatgaaacctgcgtccacgtagctcatgccgcgctgcctcaggaagatgggaatccaggtgtaaaagaaataggctgcccccacccggctcaaataaaagatggtgacctgccatgccttgctgctgcgcagcaggttgcggccggaagaatccggatcgcgctggaacactcctaccggatgcttgaggaagtacgcgccccacaccagcattcccagcaggatgggaataatccatattcccagcccaaagcgccagccgcccagcatgttggagatgggaacggacaggccggaggccaccgcgctccccacgccgatcatggcgctgtaaatgcccatcatggcggaggcgtggtccggaaactggtgcttgatcagtccgggaatagccgctccggcaatccccatgcccagccccatcaggaccatgccgccgtacaggcccgccacgccgtcccagctgcgccagaaaataccggccacggccagaagctggaaccagaaaatgatcttccacggcgtcagccagcgcgccacgcgcggagaaatgggcgcggccacgcccagcacaaacacgggcagcagggcaaacagccctgaattttcaagggaaaggcccatatccttttcaatcgttcccaacagcgggtccggagagtcaaatccggtccgcagattgaaacaaatgatcaaaaaggccacaagcagcagcatctttcccttcatgcttccggaagttcctgccttatccatcccatgttatacagccgttcccccgcccccgttcaaaagtaaaaaacttttccggctgtatgcggcagggggcccgggaaacggtttgcgcggctggacggaatgcgaagcatgaactccgcagaatgagggaagccgaacgtggaacaaatcactctcttgaccccggcaccgcagccatcaggaaaggcagaggaagacatgttcccgcagcttgaacgaaacaggccgcctgggaatgaaggcctcccggccttcgggaatccatcctgggagcgcagcaagccaagctctggaaaggcagccatttatatctctccttttccagtttttccactcacatctaaaaaaacaccatcatattaaaaaagaatgtcttacggcttgtctgcattttatattcctataggaatatttggaattaaactaaattcccttgacgatgaatattttcagtattacaagcggatatgcctactacatgcccgtcccctgaaaaatgcctccgatacgccgagaccgtccaacggttcggcatcaattttctgagagtggccgtcttcatcgtctttgcctggattggcggcctcaaggccttccagtatgaagcggacggcattgttcccttcgtagccaacagcccgatgatgagtttcttctacgacaagaaggctcccgaatacaagcagcacatgaataaggagggagccgtggtgccggccaatatcgcatggcacaaggaaaacaacacctacggctttgcctacgggctgggaatcctgatcgtctccatcggcacgctcgtactgctgggcctctttttcccgaaggtgggcctcatcggcgactgcctgctcatcatcatgaccgccggaaccttgtccttcctgataaccaccccggaaacgtgggtgcccgacctgggcggacccaaccacggcttcccctatctgtccggggcgggacgcctcgtcatcaaggatatcgccatgatggccggaggcttcatcctgctgggcacggatttcaagcgcatcctgaaggcgcgcctcggttgcccaaggagcggggaatcctgctgcaagaactgattctttccgtcaccgcctctgccgaacggcagaggcttttttatgcgttaatgttccatatgcagccgtctggagcggcttaacctcttgcgtcaattgaaagaaaatcaagcgtcagcgaaggaataataaaaaagggcgcagtccctggccgcattccgttcagaaaccgcagaggcctgcggcgccccgggaaccgttcctcctgcattcagagcgggagcacggaacagccgcctgttccgctaaatttctcccggcagggaatggaggtacatgtacagggcgtccgtgctgttttccagcacgtccatggtgagctgcaagggttccgcgtaaatttcaggataatccgcttcccctatttccggcctcacgcggaacgcgagccgttccttctccaaatccatctccgcccggatgccctctttattgcccctggcgtcaagtctgatccacctgcccggatcttgcagaaaaaccgcattcagggcatggatgcagtacccgcttcccggcgtatcttccagcgtcagccgctggtagcatatccccgccgggatgccgcaggctctgagcagggccgcaagcagattcgccttagcccagcagatgcccgttttctcccgcagcacgtctgacgccgaaaccgtcactcttttatcctgcgcatcccatgaatggcttatttcatccctcacgaagcggtaggcgcctgctatccattccagctctcctttacctgcggcgcggagccgggcggccctgtccagcaccagctcatgcttccagtcaatataaggactggttttcaaatattcactgaggtcgttgacgatggcggccatgcttgcttcttcacctcttactggaaaaccggaaggaagtacaggcggaaaaggccacgcaggttccgggggcaagatggagcttcacgatgaagaaatcagccacggtgtcctgggcatgcagcaggcctgataagagcgaaagcattccggttttcgtacctgaacttatcccaagcgcggcaaagggaaatttctgcgtttgccgttcatggttttgcaaggggcgggagcccttgttcccgggacgcggccataaaaatacaccggagaagacgtatggggcgattattcacctggccgctttcctgtggccggagggccgtcatggagcgagaacacccccatgaaaaagcgccgccgttccggagaacggcggcgcccgaacacgctaacctcttaagcttttatttggcgggacgcttgccgtacgccagcgtacgcttgccatcccaggaaacggcctcaatccgggtggagccctccggatagggaaccgtggtggaggagttgtccttggaatccgtccccaccatggtgatgcggaccatttccttatccttgtaggtttcaaagacggcggcgtttttccacacgtcatgggagatgatgcgccggttgccctgttccgtgatgccctggttgcaggcgccccggacgggcaggcggttcttgtacgcctccacgctgttgacggaaaggtagtaaatgacggggctttccggcttcttgtactttctggcgtacgcaatcaggtttttgcaatcggactccgtgatggtcatgcgggcgcaggtgtagtcgtccagttcctggtcaatgggcttgagcatgccggtcttctggaagaaatccgtcaggtcctgtttggagacgtcgcaggcgttcttcatgaacgcaagctgaagctcgccgtccttcttccccttggtgtccatcttgatggccttgtagaagatgtccggatagaagtcgggattgcccttcccggccaccttgaaatacagctccaactgccacaggggagccagcttgacaaagtggtcgtgcaccatcgggcggttgtcccctccggaacgcttgtccgggccagtctggatgagccagttttcccccttcaggatgccgttgttcaggtaggcgttaaagcggccgccgatcatgttgccgtccccgccgttgatgcgttcatgctccaggcgcatgctggagggattcagcatgtagttcacgtaggcggagtaaatgttgttggtcacttccccggtggatacccatttcatggcggggcgcacctggttgacatggccgaattcatgggcgatgccccaggcgctgccgggaatcttgtccggattgcccacttcccccatcgtgccgttgtggaaggcggcgcccgtgccgtccgcgtgcatgaagccattccagatcacgcggccgaacatccggtttttaggcagcatcttgtacttgtacaggcccatgatctgctgctccatgccgatgatcttgtcatacagggcgatcagttcctcccccttgtccgggcagaatttcttgagttcctccaccggataaaccaggtgcacgcggctgccaacgatgtccaccacctccgtgggggaattttccagcatcttcttccagtcgctgttcttgctcacgcctcccacgaacacgccgttcaccttgccggacgggatggagagccgtaccttgggagctttcttgtagttgggcgtgaagtattcaatgtagcccagccccttgtttttcgccttgatgatgttgattcccgccttgagggggtaggagctgcggcctccgtcacgcccgaagttgtggatgaccaggttcagtttttcccctttggggtcttccatgaccagcagcacgtcctccccttcctcaaaaaagatgccggtggggttttcaaacttgctgtactggctggtgcgcaggcggtccgccaggtccttgaccggttcgtacggttccgccgtgatggcgcgcgccttgcggtcatattttttctccgccatctggcgggcgagcccgcgcacgaagggatccttgattttggcgatgcggtcacgcgtgacattgggtttcagcgccagcatgaagtcattggtgaagacgttggaatccagcgccttcaggcccgcttccgtaatcggaacggacccggtctcctgggcggaaagcacgccgccgcccagcatgccgcagagagcgagcaaaatggctccctttttcaagaatggtaagaggatcatgtttataaaactatactgatcagtttcctgaattgtttcaaggaaaaatcctccggcaggaacatggacggaaaaaggccgtttttgtgacatggggcgttcctgccaccgcttaaaaactgtccatccccttgacgagatccctataatggcacccgtaacacatttttccatatgaatacagaaacgcatcaattccaggcggaagtccggcagctgctggacattgtcatcaacgccctttacagcgaccgggaaatctttgtgcgggagctcgtttccaacgcctccgacgccctggagaagctgcgcttgaaacaactgacggattccaacatctaccagccggaaaagcctctggaaatcagcatcaccacggacaaggagaacaagaccatcaccatcgcggacaccggcatagggatgacggaagcggacctggtggaaaacctggggaccatcgcccattccggcaccaaaaagttcatggaagccctcaagcagaagcaggaaggcggcgcggacctgatcggccagttcggcgtgggcttttacagctccttcatggtggcggaccaggtggaggtctttacccattcctacgaaccggaggcggcctccctgcgctggacttccaacggacgggagggctacagcattgaaacccttgacgaaccgctggaccgcggcacccgcatcgtcatccacctgaaggatgagtatgaggagttttcccaggaataccgcgtgaaggagctcctgcgccgttattccaacttcgtgggcttccccatcaacttcaacggagagcacatcaacaccgtccaggccatctggtccaagtccaaatcagacgtgaagccggaggaatacgacgagttttaccagtttatctcccatacggatgaaaagcccctgtcctacatgcatttcagcgcggacgcccccatcatgctgaatgccctgcttttcatccccaagcgtaatccggaaatgttcggcttcggccgcgtggacgccaacgtctccctgtactgcaagcgcgtgctgattgacgccaagccggaaggcctgcttccggaatggctgcgcttcctgaacggcgtggtggacagcgaggacctgcccctgaacatttcccgcgaaatgctccaggacaattccctggtgcgcaagatcagcgacattatcaccaagcgcttcatcaagcacctggacaaacttgccagggacgaaaaagaaacctataaggaattctacggacagttttcccgctacctgaaagaaggggtggtcacctcctggccgaacaaggaatccctaggcaagctgctccgttttgaatccaccgccacggagccggaggaaacgacctctttcgaggaatacatcacccgcatgaaggaagggcagacggctatttacgcgctcaccggcccctcccgctcccacctggaaaacagcccgtacctggaagccttcaaggcccgcggatacgaagttgccttcttcacggaccacggggacgagttcgtgctggactccctgtccagcgtggacggcaagcccgtcacgatgatcgaccgcgccgacgtggagcttcccgagctggaagaggaacagaaggacgccctgccccaggaggaagccaccgccctggaagaatggctgaaagaactgtacccggacaaattctccaaggtcaccctgggcaagcgcctggtcagcggagccgccgtggccctgcaaagcggcaatgacatgggcccggaaatgagggcgtacatgaaagccatggggcaggaaatccccgaaagccatccccagctggaactgaacccctccaacccgctggtgaagaagctctccgccctgaggacggaaaatccggaactggcccagatggtggcggaccagatcgcgaacaccgccctgctccgcgccggcatgctggacgatcccgccgtgctggcccagtcctcccaggccctgatggagcagctcctgcttaaataaagcctccggcggaaacggcctctttcacaagccgctccctgccccgggggcggctttttcctttcattccccgtcatgaacgcgttccaccacatgccccggcacttcctgttcctgaagctggcctatcaaacgggcatgtgcctgctggccctggtcgccgtgacgctggcggccattgacctgacttccgaggcggcggaatgggaagtgacggcagaccgggtcatttactggattttcgtgctggattacgtggtccgcttctccatcagcaggtccaaatggctcttcgtcaaggaccatgtctgggacctgctggccatcattccctttgacgtgctgttccgtctgttcaggttcgcctccctcggcgagattctgcggctcgccaggtacctggacctgttctcctacgccatgaggttcaccacgcgcatcaggcgtttcttcaacacgaacggattcaagtacatctgcattgccgccctggtcatcatcctgctgggggccgtgggcatccatctggcggaaggcatgagccttcccaacggcatctggtggtcctttgtcaccgccactaccgtgggctacggggacacctacccggtcaccactcccggaaagttcctggccgttttcctgatgctcacgggcatcggcttcgtgggaacgctgaccagcaccatcacctccttcttcctgcatccccatgcgggagaacccatgccgtacagggaggaggaaattgaagccatcaagaagaagctggacggcctctcctccatgacggacgaggacatagacaccatggcggccctgctgaaaaccctgcgggacgccccgcacgcatcttccccttcagagctggaaactcctgcctccggccccggcactttaccgcaaaagccggaatgacccgaatgccggatgcgtctctgcacccctcctgccgtcctcccttctttttgcaccaagactgacaaaaatccgtctggcattgcacgggcaaaggcggacaatccctctgtgccgcctctctcctttttccaacctctccgcctttctccatcatgccagtgaccagccccccccgcgcctgggccgaaatcgacctcggggccatccgccataacctgaacgtcgtcaagcaggcggccaagggtgaatattacatgcccgtggtaaaggcggcagcctacggtcacgggctggaacaggtctgccgcaccctggattcggaaggcatcgccttcttcggagtcgccaacgtgggggaagcgcggcgcatcagccaggcggggtgccgcacccggccctatatcctgggtcccgcctttccggaggaacgggaggaaatcgtgctgaacggctggcgttccttcatctccaccatggaggaagccgtgcactacaattccctggcgcgtctgtacgggaagacgcttcccatccatatctccgtggatacgggcatgggccgcggcggattcctgccggaccagcttgaagaattgctctcccgcctgggggaactggacagcctgtacatggaagggctgggcgcgcacctgccctgcgcggacgaggaccgggaaatcaccctccggcaaattgcccgctttgaacagatggccgcccgcatccaggaaaaactgcccctgaagtactgccatctggccaacagcgccgcttccctggattatgagattccctccaacaacatgtgccgccccgggctggtgctgtacggcttttcccccattacctccccatgggccgcgcagttgaagccggccatggccctgttctcccgcctgacggtggcacgcacgctgccggaggggcacggcatttcctacggaggcacctttgtaacggaccatcccaccagggtggctaccgtgggcataggctatgcggacggctacgtgcgctccctggcccacaagggcgcccgcgtgatggtggacggcgtctcctgcccgctgctggggcgcgtgacgatggaccagatcatggtggacgtcagccgggtgccgcacccggaaccgggcatgaccgtggagatcatggggccgaacattcccgtgacggaactggcggaaaaggccggtaccatttcctgggaaatttttaccggaataggcccccgggtgccgcgccactacatccactgaaccctctgccggagaagcggtccgcccgtgttcccttattccgcgcggtgccttcattcccgattgacgggcagcctgaaatatcgtttattgatccggtatgatgaaggtttccaccagaggacgctatgcactgcgcctgatgattgatcttgcccagcacaatgacgacggctacatctccctgaaggagatttcagccaggcaggacatcaccgtacggtatctggaacaaattatcgccatcctgctgaaagcgggcttcgttcagagtttccgggggaagtccggcggctaccgcctgtcccggcatccccgggaatacaccacggaagacatcctgaaactgacggaaggctccctgctgcccctttcctgcacggcttcccagaacagcccgtgcccgcgggcgtcaagctgcgccacgctgcctttctggcgggggctgcaaaaggtcattgaggattacctgggccgcgtcacgctggaggacctgtccgagcagcagaaggaaatcggctgcgactacggagcaggcatttaaccggagcacccggcctgaacattttttcgccccttttttgttttggccttatgtcccactttttttacccggcacttgacatcccgtcccgctttaactatctattccctactttcccgataggaatataaaaaatatgaataagaaccatcgttttgaaacgcgccagatccacgtgggccaggaaaatccggacccggccacggatgcccgcgccgtgccgatttacgccaccacttcctatgtcttcaaggactccgaacaggcggccgcccgtttcgccctggcggagccgggcaacatctacaaccgcctgatgaaccccacggcagacgttttcgaaaagcgcatcgccgccctggaagggggagcgggcgcgctggcggtagccaccggagcggcggccatcgcctatgccgtccagaatattgcgcgcgccggggaccacatcgtttccgccgccaacgtgtacggcggcacttacaacctgtttgcccatacatttgccgaatccggcattgaaaccaccttcgtggacggcagcaatccggacaatttcgccaaggccatccgggaaaatacgaaggccctgtacgtggaaagcctggacaacccgaactgcaacgttgcggacatagacgcgctggcggaggtggcgcacgcccgcggaattccgctcattgtggacaataccttcgcctccccctttctgttccgccctctggagcatggcgcggacgtggtggtgcattccgccaccaaattcatcggcggccacggaacggcgatgggcggcgtgattgtggacggcggcaagttcgactggacgcagaatgataaattccccggcatcagccagcccaacccgaactgccacggcgccgtgctggcggaaatctgcggccctctggcctacatcatgaagatccggaccaccctgctgcgggatacgggagccaccatcagcccgttcaattccttcctgctgctccaggggctggaaaccctttccctgcgggtggagcgccatgtgcagaacgccctgcgcgtggtggattacctggcggctcatccccaggtgcagaaggtgaaccatccctccctgccggaccatccggaccacgaactttaccggaaatattatccgaacggcggcggctccatcttcacctttgaaatcaagggtggcgcggaaaaggctcgcaagttctgcgaaagcctggaattattttccctgctcgcgaatgtggccgacgtcaagtccctggtgattcatccggcctccaccacccactcccagatgacggaggaggaactgaaggcggcaggcatctcgccctccacggtgcggctttccataggcacggaacatatcgacgacattctcgaagacctggaacagggcttccgcgccattctctaacgatttaacggctacaacgctcttttcctacaagccatgagaatttacagaaacattacagaactgatcggcggcactcctttgctggagctgaccaattacgaacgcaaaaacggcctgaacgccgctatcctggccaagctggaatacctcaaccccgccggcagcgtgaaggaccgcatcgcccgggccatgattgacgccgcggaagcctccggagagctgaagccggattccgtcatcattgaacccaccagcgggaacacgggcatcggcctggcggcggtggccgcctcccgcgggtacaggatcatcctgaccatgcctgaaacgatgagcgtggaacgccgcaacctgctgaaggcctacggcgcggaactggtgctgacggacggcgcgctgggcatgaagggagccattgccaaggcggaggaactggccgcaggactccccaacagcttcattcccggccagttcgtcaacccggccaacccggaagtccatttccggaccaccggaccggaaatctggaacgacacggacggcaaggtggacatcttcgtagcaggcatcggcaccggaggcacgattacgggcgtaggcaagtacctcaaatcacgcaatccggaaatacggatcgtggccgtggagccgtccgcctccccggtgctgacccagggaaccgccggcccccacaagattcagggcattggcgcgggtttcgtgccggaaacgctggatacctccgtgtatgacgaagtcatcaccgtcaccaatgaagacgccttcgccaccggcaaggagctggcgcgcacggacggcgtgctgacgggcatttcctccggcgcagcgctctgggccgccacgcaggtggcacagcgcccggaaaacgcaggcaagaccatcgtggtcctgctgccggacacgggggaccgctacctctccacccccctgttcacggactaatccttcccatcctccagccatgaaagaattcagcctccatctctacctggtcactgatgaagcggccaaatgccgccacagccttctggaaaccgtccagagggcggtggacggcggcgtcaccatcgttcagtaccgctccaccaatccggacgcgggcacctgctaccgggaagcgctgcccatccgggacttcctggcgtcccacggcgttcccttcatcgtcaacaaccgcattgacctcgccctggcgctggacgcggacggcgtccacatcggccagcgcgatcttcctgttcctgccgtcagggccatgatcggcccggacaggattctggggctttccgtctccaacgcggaccagctccgcgccgtagacgccgccctggtagactaccttgggatggggcctgtctttcccaccatctccaagctgaacgccccgcccgtgctgggcgtggacggcttcgccgccctggcctcacaatctcccctgcccgtcgtcgccatcggcgggctggacgtggagcgcgcccggctggtgcgcgctacgggagcggccagcggcattgccgtcgtctccgccatttgcggagcggaggatccggaagccgccgcacgggcgctggcctgaccggctgcattccggaaacaagcgggcagcaaaacattctttcaaacgccatgccttcaccaactgacctcgtccatgccgtctccgccgatctggaaaaaatccgggagacggctccgttggttctctctctgaccaactccgtcgtccagcccctgacggccaacctgctgctggccgcaggagccgttcccgccatgcttaacgatgcggaggaagccgtggaaatgctccgcggcggaacgggagccctgctggtcaacctgggcaccgtgacgcgcgaacagggcgccgtcatgcagacggcggtgcaggaagccaaccggctggacatcccctgggttctggacccggtagccgttggagctctctccctgcgtacgcggctggcggaacagttgaaggaacggaagccccgcatcatccgcgggaacgcctctgaaatcatggctctggccgggtactcctccgtcacgaagggaccggaaagcaccagctccagcgcagacgccctgcaggcggccagggaactggccctgcatacgggggcggctgtcctcgtcacgggccgcacggactattccacggacggccgccaggtgatttccacggaaaacggacatgccatgatgtcccgcgtcacgggcgtgggctgttccatgggcgcgctggccgccgcctgcgcctccgtctcctcctcccccttgcaagcggccgtctccacggccgtattaatgggcatcgcgggggaaatggcctttgaacagagtcccgctccgggctcttttgccgtctccctgctggacagcctgtactccctttctccggaagaagtggcgcggagagcgcgcattcttcccttttaaaccgttactcctccttcccgtaaccgcggaaaagcagcgcgccgcactccctccggaatgcggcgcgttgaatttacaggccttctttattcgttccgcggaacggaacggcgcaggaacaccgctcccagcgcagccatcagcagcatgcatgaggacggttcaggaacaggagcaggcgccgtagccgtaaacgccgatgccatggctgaagaagcttccggagccgcattcggcgtccacaccatgctcacttccttggaatcctcgttcttctggaggctccactggccgtacgccgcgtaatctccggcggaagacgcatccagcgtgaaattacccgtcagggtcgcgttcgctcccccctcaatgaagttcaggatgtgggaggttccccagaagtcggtggaatagtcgaggctcaacgccgccagcttcagcttggcccccgcgtcaatctggaagacgccggactgaagcatcaggctgttgtacgccagttcattcccggcggaaccgcccatggacaaggtcagttcaaagacggagccggactgaagcgtcgtattcccggacagggtggcggaaccggacagaatgccgccgttcttcaccagaatattattccccaggctgaccgtgcccgcatccgtccccaagcctcccagtaccaggcagccaccggaattgaccgtcgccatccccgtcccgagagcctggttggaggccgctgccagcgttcccccattgacggacgttccgccggaataggtattctttccggataaaaccatgatcccctctcctgtcttggcaacggagccctttgctccggagtaattgacgatgttggctgatacttttaaatccgcctccgccgtgccgcgctccaccgcaaagacagcaggactgcctcccctcagcttgacattaaccgtcctgatttccgaggccctgtccgccgcccttacctggaaaacggtatccgtccagacctccatgcttcccttcgccacgccgtccagcgtccctcctgccagggtgacggtcatgttccggaaggtctggttcctggtatcattctggaacagggttcctccgttaatttccacatggctgacgcaggcctcatttcccgaattgccgaaacagtccaccccgcgcagggaaaccgttgcgccccggttgataaccagccctccgcggataataccttcctcacctcctgaaataagcatcagcgttccttcattgaccgtagttcctccggtataagcctggtgtttctgcacggcgagcattccggaaccgtttttcacgaggcggcccgtcccggatatttgcaaattaacggagccggcgcggagcgaattgaaagcgagggttccattgttgacaatcgttcccgtacccagggaaccgtctttttccccgtcacccacggcgagcgtccccgcatcaatgacggtacctccggaataggaattggccccggtcagcaccagcgttccttccccggttttcacaagagagccggttcctgaaataacgccggattccgtcgcggaaccggagtccacttccgccctcatgacggccccggaaccggatagagccacgttcccgctgtgactgccgccggaaagaatggcatacgtccctccgtccgccacgttcacggaagagccaacttccgcatggcctcccgccgtgaaccgcgcaccgctctccacattcaccgttccggtggcaaagagggccgtctcccagtcgttctcatccacatagccgcccgcgtgcagggcatgcaccccggctaccttcacctcacctccctgcaccgtccatgtcccggtattgaaaatatgcccggacaggttccagacggaaccttctcccgtgccgggcgcgtacaccacatgaagctggccgtccttcaaggcccctccgtccatgaagcctccaagatagtcctgcgccccgtgccccgtaaacgtgaatgtcacggcggtattcgcacggaaattgccgaagcaggctccggaatccagatgcgtgatggcattcagcgtcaaattatgcccgtacatgtccaccacgcccccgcggtggccgaagatgaactccccggacacttggttttccccggcaaggcgcaccattactccgcccccgttcagcttcacgttacgggccgcgtagccgtccctgtccagaatcagatttccgccgccgcccacgttgatgtccgccgcattgttcccgtggccgctgacgatcaaatcgccttccccaatcttcctccactcgtctccggaggctccggtcagcaaggtggtgaccgcagctcccttgttcaccacaaagcccgccgtattcaggcggcgggaagaatcgcccccgtcgctcagcacgtaatcgcggttgaaggtgagggagcccgctccggtatccacggacccctggagcacgattgtgccgccggagccgtcaaaaatcagattattgcaggcgttcaactgctcatttgtagcttgtgtacctttcgtggaggtatccccgcgtaatccggccgccaatccggtgtaatccgtagtcacgcctctctgcacaaaggtcccgttgccgtccgtatccgtcacgttccacagtacgtcaccgctcgccgcaacgcttatggtacggttgaagctgtccacgtaatcgctggcccactggttgccggaacgcatctgggtaaactgtccatacccgcttccactggcagactgtgccgcacctacccactcccacttgccggaattctcattgtacacatagcacgggcttccactatcccctgacaatccaccggaaggcaatggattggactccgaaggcttcttgaaattgtaccagaaccggtaagccggataggtcttggcattttccgggtctggctctcctgttcccggagcgctggcctgcccctcaaaaacaagggttcctccggtcaaatagccataagaggcatcaatcttttcctgtttgccgtttcctgtggcgacagcctgaactccggaaccagctctcatgaccagcctccctttcatgttgtccaggtattccgggtcagtcaggtaaggtgcgtattccgcctccgtcacgatcttgctcaatcgctgcacacggtagtcgtatgtcaaatcggacttatcaccccatgcatcctttctcgtaacgctgcggtaggaatcgtaaaaaggagttccttgcttggcaccgaaacgaaccgtaaaggaaacgaaatggttataataatcatgtgatacggtggcgatgaagccgggaccgcccaccagcgcggcctccccgatgtgggcatccgccacgccgtcaaaattcatcattttggggatagttcccacgtaattgccattcttgtcgtagatggcgacgtctttggcattcacgtcaaaaatgccccggttttccgcgaaatcacggtaggtctgaacatcaaacgagtcagacatcaacccgccataggcgggagtgaggaggcaggccgcccccagcagcccggaataatgataaacattcataagaaattgaaattaagttatgattaaacaaggaacaggcaagtctgccgcacttcccatcttccagtccagaccgtttgcacgaacatccggcagggcttcgggaagtgcggcggggttcttcatcaggctcaccgcacacggcggcggaaaatacacgtccccaggcctgccagcaccagcagcgcggaggaaggttccggaaccggcgcaggagacggagccgcgagcaacgccgcagtttccgaatggtccaaaacggcctcggcattgggagtccagaccatgttcacggttttggaatcctcatcgccctggagggaccaggacccataggagccataatttccggctccggacaggtccagcgtaaacgcccccttcaaactggcgttcgcgccgccttctatcaggttcaggatatgggaggtcccccagaagtcggaggaataatccagagacaccgccgccagcttcagcttggctcccgcgtcaatctggaaaacgccggactggagcatcaggctgttatacgccagttcatccccggcggcccctcccatggacagggtgaattccagcatggacccggcattcaaggtagtattcccggacagggtggcggaaccggaaagaatgccgccgctcttcaccagaatatcatttccaagagaaacggaagccaaatccgttcccaggcccccaagcgccaaacgtgcgccggagttgaccgccgccaaaccggttcccagagcctggttggaggccgctaccagcgttccccagttaaccgtggttcctcctgaataggtatttctgccggaaagcaccatgatcccggcccctttcttaatgaaggagcccttcaccccggaagagttgatgatgttggacgagacattcaggtcagacgcagacttgccgcgttccaccatgaacaccgtcggattggcgtcccgcaacagcacgttgatgttcctgatttccgaggctttgttcgcggctttcacattaaccacagccttcgtccagatatccatgcggcctcccgtgacgccatccactacagcgcccttcaggttaaacaccgtattctgaaacgtctggttggctttgtctccaaaatacagggtgcctcctgtgatattcacgttcttcacggaagcgttccctccggaataaccgaagctgtcgccgcccttcaacgtcacctgcgccccctcctgaatggcaaggttcccgcggatcattccgttggcaccgccgtagcccagcacaagcgcgccttcattcacggtggttcctcccgtataggaaagcatcttctggatggtaagcgtgccggagccgttcttcaccagagctccgctgccggatacattgacgttcacggcaacggcatcagagcggttgaaggccagcaccccgttgttgaccacagccccggttcccagggaaccgctggttccgccatcgcccacagtgagcgttcctgcggcaattgtcgttactccgctgtaggaattattacccgtcagcaccagttccccggcgcctttctggatcaatgcccctgttccggaaatggcgtttcccgccgtcatcttgtccgtcctgttgaacgccagcgtgccgtcattcacaacggcgcccgttcccagggaaccggctgttcctccattgcctaccgtcaggaaagctccggacaaaatgcgcgtttcaccggaataagtattatccgccgccaggatgactccgcctgaggtctccattccctgcgtatccaccgtcatggcatgggcccctcccagggagctggctaccgtcagcgttccgccgccgccgaacaggtaaccctgcgttccggccgtcacggaaccggacaggacggcctggccgtccgccccgatgtaaacggaatccagtcccattccgcccaggtccaaacccgacgtgcggtcaccggacagcagcagtacgccaccggacgcattggacacgtgcgccagggctgcatccacttccgctccaagggaaaacgaggttccgtatttgacgagcacgttcttgttctccaggccaagggaacgcacgtccgtataggcaagccgtactcccccattcaactcaatggctccggaaaaggcggctccgccttccgaatcactgttatgcgcattggcaagcaccacggcgcccgtattggatccgttgccgatggacaaggtgccggaaccgctgagcttcaagttcaccgtcagcgttcctcctcccccgcccagggaccagccaccgtccgcggtccagccggatagaacttccgtggttccggacgttcccaaattcacctctcccaatgcgccgacggacaagtttctgaagccgttcaggccggaaatcgccgcctggtcttccagcagcacgaacgttccggaagacgcctggtccagctttccggcaatagcggaaaaaccagcgccttccacagccagggctccggcggcatccagcgaccagacagcctgcccgagagccccggcggaagaggcgcgcaccaggccttcttcaaccgtggcagttccggaaaaactgttgttcccgtttttcagaagcagggttccttccccggttttcaccagagaaccggctccggaaatcacgccggactccgtcgcggacccggaatccacctccgcacggaacatggatgcggttccggacaacacaacgtttccgctgtgatttcccccggccagcacgccatacgtgcctccgtcatccacctgcacggcagacaccaccagggaatggccgccggtggtaaaccgggcgccgctgttcacctgcactgttccagtggaaaaggaggccatctgccagtcgttctcatccacatagccgcccgcgtgcagggtgtgcactccggccaccttcacctctcctccctgcaccgtccacgttccggtattgagaatatggccggccagattccagacggacccttccgccgtgcctggtgcgtacaccacattcatcagtccacgggaagcggcctccccgtcccgcaaagcccccaggaacgtctgttccccggagcccgtgaacgtaagcgttacggtggaattgccaaggtaattggcaaaaacggctccggaatccaggtgagtgatggcgttcagcgtcaaattgtgcccgtacatgtccaccacgcccccgcggtggccgaagatgaactccccggatacttggttttcccccgccaggcgcaccattactccgccgccgttcagcttcacgttgtgcgccgcgtagccgtcccggtccagaatcagcatcccgcttcctcccacgttgatgtccgccgcattgttcccgtggccgctgacgatcaaatcaccttccccgatcttccgccactcgtccccggaggttccggtcagcagcgtcgtcacggttgcccccttgttcacaacgaaacccgccgtattcagacggcaggaggcatttcctccgtcgctcaatacgtaatcccggttgaacgtgagggaacccgcccccgtatccaccgagccctggagaacaatggtgccgccggagccgtcaaaaataagattgttgcacacgcctatctgcgtgtccgaggcccgcgttccctgtgtggaggtatctcctcgcaggccggaggccagcccggtgtaatccgtgctgatatctccctgaacgaaggttccgtttccgtcgccatccgtcacattccacagaagatccccacccccttccgacacgctgacggtgcggttgaaactgtccacgtaatcgctggcccactggttgccagagcgcatctggctgaactcgccgtagccgctaccgccctgggattgaccggcccccacccattcccatctgccggacttctcattaaatacatagctgggacttccgctgtcccctgccaatatgccggaaggcaggggattggattccgaaggtttcttgaaattgtaccagaaacggtaggccgggtaagtcttggcattctcagggtccggctctcctgttcccggaacgctggcctgtccctcaaaaaccaaggttcccccggtcaaataggaataacctccgctgaccgtgtcctgtttaccgttccccgtggcaatagcctgggttccggacccggcacgcagaaccagccgtcccttcatgttgtccaggtattccggatccgtcaggtagggggcgtattccgcttccgtcacgatcttgctcaaccgctgcacgcggtagtcatacgtgtaattcgtctggtcgccccaggcattcttgattaccacgctccggtaggcgtcataaaacggcgttccttccgtggctccaaaacgcttggtaaacgtaatggtctggttattgtaatcatgggacacggtggcgatgaagcccgggcctcctaccaaagcggcttccccggcatgggcgtccgccaatccgtcaaaattcatcattttggggatggagcccacgtaattgccttccttgtcgtaaatggcgacgtctttggcattgattccaaagatgccccggttttccgcaaaatcacggtaagtctgaacgtcgaaggaatcagacatcaatcccccataaacgggagagaggagacaggccgcccccagcaagccggaatgatagaaataatgtaaattcatggcagaacgagctttaggttaaaataattcaaatcataaaaagtgctgctattcaaaatgttttttaaaggacgctccaggaatctggaactttatttcattcccaataattttaattattcttcattttgttagagtttgaaaacaccatttgttttcaacaaacgactttacattccccccacaacaagaactggcgcgaataccaagctttgcatgacacaaattatttcttctttttccttgcttcaaataaatttacctgaaagttcgccttttccggcactccgcctcatctcttctccataccgcgcaagaatgaaacctgtttagtattgtgaaatatccccggccttttataatgaagggcaacccatttcagcatggcaaaccatactaccacgcaaaagctctgcaactggttcattcagcaggcgaatgcaaaaaaccttcctctcacgcccgtcaaactgaaccacctggtcattctggcggactggtggcacctgcaccatcacggcgatttcctgatcaacgaacgggcggaagcatggacctgcgggccggtgctcccctccattcatcacgaatacaaggaccagccgccctgctccatcattgaacaccccagccgccgccagccccccctggaagaggaaacggacatcatcccttttctggaacacatctggaacgtctatggcaaatacacggcccagcagcttggccgcatcaacacagcgccggcctccccctggcagcaggcgcagggcaggcacggagaagcggaacaccagcaaattgcccgggaacacgtgaaagcctacttccaaaccctggctgaatgaccccgggagaaaagctggaccgcccttttttctccgcattcattttttctattcaaaacacacatttgagtgaaaaaaaacttgcaaagaacagccggttccgctttaattcgcccgcaccgcaaaggtgcccgttacatagccctatagtgtaatcggtaacacagcggattctggttccgtattttggggttcgagtcctcatagggctaccacctttaagaaaaaggccgtctctccggaggcggccttttttacttttaacgttcctctgggccaggaaaaagtccggaactttccagcaactgcggagtccttcaaagcgtggacggcacctttccaaataatccctctgttgatctgaggacacggacagtaagaacgcaaatgcacattttctccatcctccaccgtaagggaatattcccggacctagaaaaacggtcaaatagccgctaacagcgccagacggaccatgggaaaaagacaaaaggccttccctctttccggcccttcctctttccctgaaaggaacttgtgtccggaccgccgggatgccagccccggtaattcctgagaaacattttgtcaaagggtccaccatttcctttcagcgggcatgaagcatattccgccgcgtgctcatgaaggagcaaatttttgaaagattctctcccggcacggcttatactgaaaacatgacaaggctttttccactcctggccggattgctgctgttcccggtatttcaaactgaagcagcagaaaaatacagcattattccggagccggagaaaacggagctgaagcggaacgccaccaggaccttgaagctcctctccgacaaaacctctcctgccctgggcaaggacgcctaccgcctcgccgtcaccccgcagggcgtccaccttgcctccggcggcagggagggcaggatgtacggcctggtcaccctccagcagctccaggaccagctggcggcacagccggagggcatcccctgcggcgtcatcacggacaagccccgctacccctggcgcggcatgatggtggaccccgcgcgccacttcatccccatcaaggacctgaagaaattcgtggacctgatggcctactacaaattcaacaagctccacgtgcacctgacggacaaccagggctggcggctgcccgtgccgggctatcccagactgcaaagcgtcgcctccaagcgggaggaaagcttcggagacggcatcccccatgaaggcatgtacaccaagcaggagctgaaagacctggtggcctactgtgcgacgcgcggcattgaagtcatcccggagatagacgtgccgggccacaaccaggccctgcgtgccgcctaccccgaattcttctgcttccccaaaccggacatgaaggtacggacagtggccggcaacagcaaggaactggtatgcccccagaagccggaggtctggaaattctacgccgccgtcttcaaggaactcaaggacatcttcccgtccaacaccgttcacctgggcggcgacgaagcccccacggaactctggaaaaaatgccccctgtgccgggaagcccggaccaaggcaggcatgaaagacgaacaggaacaaatgagggctttcttcgccaaaatgacagctctgctcgacaaaaacgggcaaacgccgcaattctggtatgaagggaacgccggcatctaccacccgggcgaaacagtttacgcgtggcggcaggaccaggcgcgccaggccattgagaaaacaaaaaaggccgggctgaacctgattatggcgtccaatgaatattgttatctggatttccctcaattcccgggacaatacaactggggatggatgcaaaccacgaccttgcagaaatgttatgaactggatccggccttcggcaaatccaccgcggaagcaggccacatccggggcgtgcacgctcccgtgtgggcggaacaccttccggacctgaactacctgctttaccgcgtctatccccgcgccatggccctggcggaagcggggtggtctcccatggaggtgcgttcctgggaaaacttccagaggaaagtggccgaccaccgcccctttgtcctcaagcgctttaattacgacttgaaacgcacgaaggacaatgagccgcccttccggtgggaaaacaaaaagtaattccgccgtttttccttatcactcctgattctccatgatagaatctcttctgaaaaagccctccgtcatgtttaaactgatctacctcctggcctgcacagccttctctgcatccatggcgtgtgccgcaccagcagaaaaatacagtattattccggagccggagaaaacggagctgaagcggaacgccaccaggaccttgaagcttctctccgacaaaacttctccttccctgggcaaggacgcctaccagctcaccgtcaccccgcagggagtgcacctctcttccggcgggaaagagggccgtatctacggactggtcaccctccagcagctccaggaccagctggcggcgcatccggaaggcattccctgcggagtcatcaaggacaagccgcgctacccgtggcgcggcatgatggtggaccctgcgcgccacttcatccccatcaaggacctgaagaaattcgtggacctgatggcctactataaattcaacaagctccagctccacctgacggacgaccagggctggcgcctgcctgtgccgggctatcccaaactgaaaagcatctcttccaaacgggcggaaagcttcggcaacggcactccccacgaaggaatgtacaccaggcaggaactgaaagacctggtggcgtactgcgccgcgcgcggcattgaggtcatcccggaaatagacatgccgggccacaaccaggcgttggccgccgcctatccggaattcttctgctttccagaccacaacacgaaagtcagcacgaccggcggtgtgggcttgtacctggtatgcccccacaagccggaaatatggaaattctatgccgccgtctttgacgagctcagggacatctttccgtccaccatggttcacctgggcggcgacgaagccccgctggaaaaaacctgggaaaaatgccctctcagcgtcaaataccgccagcagaagggaatgaaggacgtccacgaggaactgaaggaatttgaagcgaaaatggcctccatgctcgccgcgcgcggcaaaaagcccatcttctggtatgaaaagccgtgggcccaggccagcgtttaccgcaagggagacaccgtcttcacctggcgcatgggcttgacgccctccaccatcacggaaacgaaaaagcagggccttcccctcatcatcgccgccggggaacactgctatctggactacccccagattcccggccaggacaaccggggctggatgcccaccactacgctggagcaaagctacaagctgaaccccgcctacggcaggccggagcaggaaacagaccatatcatcggcgttcaggctaccatgtgggcggaacagctccccaccctgaaccacctgctttaccgcacctacccccgcgcctgcgccattgcggaagcgggctggtcaccaatgaacgtgcgttcctgggaaaacttccagcgcaagctggccgatcagcgccaatttgtcctcaaacgtttcaactacgatatggagcgcaccaaggaaaacgaaccccctttcaaataatccgcattctctatccatgagcagcactaaatttgcacgtccgcaccgcccctccgtagaagaactggcccagggagtcctggccgggaaccgcgccctgctgggaagggccatcaccctggtagaaagcaacgccgctaaagaccaggaagcctcacgggcgctcatctccaagctcctgccccattcgggcaatgccgtccgcatcggcatcacgggcgttcccggcgcgggcaaatcctccttcattgaagccttcggcacctacctgtgcaaaaaaggcttcaaggtggccgtgctggccattgacccgtcctcttccgtttcccgcggttccatcatgggggacaaaacccgcatggaagaactctccggggaggaaaacgccttcatccgcccttccccctccggcggctccctgggcggcgtagccagaaaaacgcgtgaaaccatgatcgcgtgcgaagccgcgggctttgacatcatcctcattgaaaccgtcggcgtcggccagtcggaaaccaccgtccgttccatggtggacatcttcatgctcctgctcatcaccggagccggagacgacctccagggcatcaagcgcggcatcatggagctggcggacatcctggtagtcaccaaggacgacggcgacaaccgccagcgcgcggcggcccactgccaggaactgaaaatggtgctccattacctgcaaagccccacccccggctggactccctccgtcctcacctgctcctccctggaagggcgcggactggacaccattgaagaaacgctcttccgcttccgggacagcatgaaggaatccggcttctggtacaaccgccgccggaaccaatccctctcatgggttcaggccctggtgcatgaagccctgctcaccgcctttgaacagcatcccgccgtggcgtcccgcatgcccgtcctggaaaacatggtggccggggacaagatggaccccgtctccgccgcgcacgacctgctgagccacttcacttatcccgtgcccggacattgaagaaatccgccagcaccctggcgtacacctccttcttgaactccggcagccactccagcctgaactcggagggagctatccatttgcaggcgcagaactcccagtggtccaggctgggctccggggcgtccgcatgcagccggcacaggaaatactcctgctcctgccccacaaaaggctgctgccgcttctcgcggacgtaatccagcacctccggcggataatcgtaacggtacccgccccgggattccacaacatcatactgggacggcaggaaccccacttcctcccggacttcccgcttcactgcctccgtggcagtttctcccggatcaatccccccctgagggaactgccaggcccctttctgcctggaacgttcgcaaaccagcagctttccgtcctcccggaccaacagccccgccacattgggacgatacaatctttccatgccttcttacctagcacaacattccctgcatttccagccatgttcttccacaaatttgctacaggcatgtaaaaatgactcggatacagacactttattctccccgccaaacaactccggatataaatcacaacccatcagcaggataagtaatataaaaaaacaaaagacaccctacctggttgtggaatttcctgttaaatatccagaaaactctggtagtcaaacattaacatactgccattttccgaacattgttctttaacggcaagtctattttcctgcaaggtgaaaactggctgactggccgctcttttacttttcacgtcccgttaataaaaactgatcatgaaaataaaaatcaattatttcgctgccatgttgctggcaatgttcgcaggaggaggcataggcgcccagggcgcagagcagcctaaaaaggcgacaagccatactattgaatacaaccaaaaatttctcggcgctcatggcctggacgagaacgacaaacaagactttcaggatgctgaaaagggattcatggcaaccctcaaggacccgaacattaaaaacaaggagggacggacagtctttgacatctctgcctttgactttaccaaggacaaaccggcccctgatacggtgaacccgagtttatggcgcgtttcccagctcaatgccaaaagcgggctgttcaaggtcatggacggcatctaccagattcgcgggtttgatctttctaacatgaccatcatcgaaggaaaggaaggcctcatcatcattgaccccctcatctcggaagaaaccgcaaaagcggggcttgacctctactatcgggaagtggaacagccggagactgggaaacgtccggtcaaggcagttgtatacacgcactcccatgtcgaccactttggcggagtcaagggagtaatatcggagcaagacgtcaaatccggtaaaacgcagatactggcgccggagggattcctgaaagaagccgtttccgaaaacgtctatgccggcaatgccatggggagacgctccacgtacatgtatgcagcgccctttaacaaggggccggagggtaccgtaggctccggcctgggaaccgccagctccagcggaaccattacagtcattccgcctaccgatacaatcaccaaaacgggtgaaacaagaacgatagacggagtggagatggaattcatgatggcccccggaacggaagccccttctgaaatgctgatgtatcttcctcaattcaaggcgctttgcagtgcggaggacgcgacccacaccatgcataacctttataccctgagaggagccaaggttcgggacgcaagcaactggtggaaggctcttgatgaagccatccagcgttatggagacaaaacggaagtcttattcgcacagcaccactggccgagatgggggaaagaacgcatcagccagttcctggccaaggaacgcaacggctacaaatacatgcacgaccggacgttgaacctgattaacaaaggatatacgcctgtagaaattgcggaaatgatcaagctgccgccggaaatcgataaggaatggtacttccggggttattacggcacgctgaaccacaacgccaaagccatttatcaacggtacatgggctggtatgacggcaacccggcaaacctgtatgccctgccgcccgtggaagcggccaagcgctatgtggaactggcgggaggtgccgacaaaatgatagacaatgcccaaaaggcctttgacaagggagactaccgctggactgccgaagtattaaagcacgtggtttttgccgatccccaaaacagcaaggcaagaaatctggcggcggacgctcttgaacagcttggctaccaggcggaatccggcccctggcgcaacgaatttctcgtcggagcctacgaactgagaaacggtctgcttcagaaccctctggatcttgtatccaaggatattctgtccaacctcacgccggaaatgctgtttgactacatgggcatcagtctcaatgccgagaaatccaaagggaaaaagctcgctttcaactggatagaccaaaacggaaaaccatacggcttctgggttgaggacgaagtactgatgtaccgagaaggaaaaccggtcgatcatcctgatgcagtaattaccggagacaagctcaacttcacccttattgccatgcaggccatgcccttgaaggaagtcctggacaagggcatgatcaagatcgaaggcaatacggacaaattcaaggaactgatcggatgcatggacaagttcaatggaaacttcaacatcatagaaccctgacattcattgtctttttttaatgaagccgttttccccagagcctgggaaagcggttttttgtatatattcctggcacagagcgaacaagctcctccgttccttggtatcagcataccatagttgcagctttgttaaaatatacccccattactacattatcatttactatatcaattggtgctattgctacataccccttactcaaagaagaactcatcaagtggctctattccctctttttccaaggggttcccagactccagcactcaaccccacacttccttcttgaactcggaagggactatccacctgtaggcacagaactcccggtggtccaggctgggctccggagcgtcagcatgcagtcagtgcaggaaatacttctgctcctgccccacaaaaggctgttgccttttctcacggacataatccagcacctccggcggataatcataacgatacccgtcccgggactccataagatcatactgggacggcaaaaatcccacttcttcccggacttcccgcttcacggcccccagagccgtttccgccggatcaatccctccttggggaaactgccaggcccctttctgtccggaacgttcacaaaccagcagctttccgtcctcccggaccatcaaccccgccatacaatctttccatgcctttttatctagcacaacttctctggcatttccagccatgttcttctacaagtttgcttgggtcatgtaaaaaggaccgaatacagacactttattcccccttccaaacaactccggatataaatcacacccatcagtaggataagtaatataaaaaacaaagactctatccttggtggtaaaattttccgttaaatatccataaaaaactgatattaaaaacaagaaggagcggaggatctttgacatctcttcctttaactttaccaaggataaaccggtccccgatagagtgaacccgcgtttatagcaaaagataatatgatcaaccatcaataatagaaaacatccaataaaattttaaatatatttggataaatattgatatagagcatcgtatcagcttggagaatgcatggaggattggcaagattaatatttccaaaaggagcaaggaaaataaaatgaatatgtatttctattaagaaatatttttattagaacaatacgcctttaaccctattttggatgctgagcataaaagtaataaaagtgtaggaactaatatggaagaggacaatccaattaatggagataagtaattggcaaaagaaaccatacatcctgtcccaatagattttcctgttgttagaaacttcttttgttcttcagtatattcgctacttccacaaacaagtttatcaaattcatttttaatccgtttccaatatgatttgctattatctgaatcacaagaaactcctccaaatcgtgcagtttgtataggcccctttgatgttatccataattctgctgctttttctatgccatatgcagagactaatttttctattatatttctttgatatgatttaagaatcggataaatgtcagagcaagatatttgttcaatttcaatcataacatttctttaatatgatttgcagagatacaataagatgtttggttaagttcatgaggattaattccagctatgtttattccacaatctgtagcatatgctccaattaataatccaacaattcttccatttttgcaattaaataccattgatcctgattgtccagggcgtgtttgtatgtttattgtcgcatattttgattttatacctgaagtttcaagaagcatttttgcccctatttccgtttcttgatacgttaaaactcttctcgccattacacagtggggaaatccaagtataccgactctatcgccaacaagaatgttgtctagtgattctaaaaaaggcagattgcctcggaatgttagatttgcttttaatacacataaatcagttataggattaatatcttctatttttgcgtctactggacgacatgaactatctgagcagtcttgataatcgtttatggaattaatatgaggtaacagtacacataacccttcttctgaatcacccacgacatgacgtgccgtaataatttttccatcattagatacaataaatcctgtaccgagtaacgacaacattttggataatggatctattttgccaatgagtaacacaatcttagaaaaatcaaacatatttacaatatgtagaaaaaaataataaatgacaactctttttttctaataattcccccacgcccctataaaaaattataataaattgataatcaatatctattcgataaaaaaattaagattagataaaaaggaatatgaactctcctaaatctgtgatgaggatgggttacctaatgatggaagaattcagtcaatatattcacaaaatagtaaatataactaacacataaccaatgcaaaatactactagagtccagagtactttaatagattttccttcacacgagctaacgactgatgttaaatagaaccatgaaacgttttctcctttccgcattggcgctctgcgtttgtgctgcggctccgctttgtgctcagtccaagacgggaactcctgcccagtctacggatgattacaaccagagccagttctggatcggtaattttccggaggggcagtatgtggtgcatctcagccggattgtggctgtggcgcagcacaagtacattctggacaatgcgtgcatggtgtatgaagtgacattggtcaccatggggaatacgcccaccaagttttattatctggagcccctggggcagaattccggcatcaatgccattaagaatgtgaccgaccgggcgaaggaactcggttccggcaccgtcaaccgggcgacgggaggaagcattgatccggatactaccgttgccaaggcttacccgaacacgaataccgtcgagttccgcgtagccactctggaacagctcaacaagatgtacgcctccctgctcaaggcgtggcaggacggaaaagggaggaccttcaagccttgaaggtagtgatgagagtttagtgagtagtgattagattttaaattcgcggactataagtccggattttttacactaaactctcatctctaatctctcatcactgttaaatgtatttcctctccatcatgtgggccttcaaggggtccgcggcgaagaggtgggtgaggccgatcgccagggcatccgcggcatcggattccggcgtttcccggagttccagcagggcgcgcaccatgaaggcgacctgcgctttttgagcggccccccgccctacaacagagagtttcacgcttttgggagagtattccatgatccgcagtccggcttccgccgcggcaatgaccacggccgccttggccgcgcccatcgtgatggccgtctgatgggactggacgtagatgatgcgttccaccgccatttcatccggttcccatttgtcaatgaggttgcccaggtgctgcttgatggcaagcaggcagccggactgggacacactccggggaatggagagcgttccgtagtccagcgcgcacgcccggcgatggtcgccctccaccacggcatagcccgtgttgcggatggccgggtctatggcaaggatgcgcatgggatgatattcattcccgcagagagaaccttgtcagctcccccttagcgtctgcggcgcttgggaccggcgggtttgaccttgcggacggatttgacgggcttgtcttccagcagggcggtgtacgtgtagtcgaagccgtccagctttttgcgttcaatgggctttccgatgaagttttccacagccgtggcaaagtccacttcatccgccgtcatgatcgtgaaggcgtctccggaggcttcggcacggccggtacggccgatgcggtgcacgtagtcttccgcattttccggcacccggtagttgatgacgtgggtcacgccgctgatgtcaatgccgcgcgcagccacgtccgtagccaccagaatatcatatttgccgcttttgaagcccttgagcgcttccatgcgttccttctggggaatgtcggagtgcatgacggccacttccccgcggtagccatgctgcttgagcatgccgcacacggcgtccgcctccttgcgggtacgggtgaagatcatgacggaatggaagtccgtccccttgagcagggccagcagcagttcgtcccgctggtccagcgccaccgggtaaaaggcatggctgatggtggcggccacttcgcgccgggcgatggtgacttctgccgggtccgtcaggcaccatttggcaaatccggcgatgaccgggggcatggtggcggagaagaagagggtctgcctgccttcccacgggcagaggttgacgattttacggacgatggggagaaagcccatgtccagcatgcggtccacctcatccagcaccagggccttgacttctccgaagcgcatggtgccgcggtagaagtggtccaccaggcggccgggcgttgccaccacgatgtccgctccgtttttcaggtcttccgtctgcttcccgtagcccacgccaccgtacagcagggccactttcaacccggtgaattcgccgtattcggcaaaggcttccgccacctggtccgccagttcgcgggtgggttccagcaccagtatctggggcttgccgatgggttgaagctttgtcagcagggggagggcaaaagcggcggtttttcccgttcccgtctgggaggccccaatgaggtcccggccctccagaatgatgggaatggcctgctcctgaatgggggtgggatgttcataaccgcatttttccaccgccttcaagacgggttccgataaacctaattctgaaaataacattgatcttgtatgcttgctagagagtagagcacgtccccgcgcagcggcgcgggaagcgtggtcaggagatgaacggattggtcagtagttcattcttcacggtggtgtacggtccgtgccccgggaaaatcatggtcgtggcgggctggttgagcactttcttttctatgccctgtttcagcaggcgcaggttccctcccggaaggtccgtccgtccgatggaaccggcaaagataacgtctcccgtgaacatgattccctcgtccggcaggtcgtaaacgatgctgtccggagagtgtcccggcacctggtgcagatgccacagcaggccgccccagtttgccgtgtggatgtccggcgtgagtatttcatccaccacaaacggctgtacgttgaggggaagcccccaggcgtcgcgcgccattttttccagcgtcaagtcttcagtgtaaggctgtccggcatgaatgcggcagccgaagatctggcgcatgcggcaggcgtcctccacgtggtcaaagtgctggtgcgtgatgagaaggtccgtgatgatgatatcgggctttttggagtatatccagtccgcgaagccggacggagcgtccaccgccacgtaagagttatccttcgtcttgaagagataaccattacaggaagctactccacccgtataaacgcgaatccgatccatgagcagggattgtagtgagatcgtccggaatatccagtataaagacggtttccttcaattgctttctgtcatcttcccgcgggggtggccgtcacaccaggctccagggaatgacgcttccggcctccatcggcaccactttctgtccatgcccctcgtaggcggccggcaccagcatttcccgccgctgcaggcgcaccgtcctggcaggaggcttcagtccgtacagggaacaggcatggccggaaacgaagccctgcaaccggtccagggcgccgtgtccgtcaaacagggccgccaggcgcggcagggcgatgggagcggtgaatacgccggcggcgcagccgcacgcttccttggcgtggacgggatggggggcggagtcactgccgaacatgaggcgcggatgtccggatagggcagctttcaacagcgcttcccggtcttccggccttttggcgatcggcttgcagaagaggtgggggcgcagcatgcccccggccacgtcgtccagcgtgataagaaggtgctggagggttacggtagccgccaggttttcaaattcatccagcagccgcacggcggaggccgtggtgatgtgttccatgcagatggtcagccgggggaagcgggtggccagatcacggtaaacgtccaggaattcggcttcccggtccatcacgaatccgtggctttcaccgtgaaccagcagcggaatgcccatttcctgcatgagggacatggtgccctccgcatccttcatggcccttacgcctccttcgctgttcgtggttgctcccgctgggtacagcttgatgccgaataccagttccttgagcgtagccagttccttttcggaataggagcggaagaacgccgtcatgtacggctggaagacgtctcccccgcaagcgtccagcacccgctgccggtaggcctgcaccgcatccgcatccgccacagggggcaccaggttgggcatgatgaccgccccggcaaaggaggcggagctcaggggtgcgaccagtttcagcatgtcgccgtccctcaggtgaagatgcatgtccagcggggagtgcagttccagaatcatgcgggtatcatgggggaagattgtggcgaaatcaagcatggtcccctgctccgcggaaaggaggggtttggcggagagaaggagaagggagaataagagcctccgctcccggttggatgcctttcattcaaaccgtggggatttatgcaaaggcaccacccctgccgggatgcgtcttgggaaaaaacaggcaaacgaacaggtgccggagaaccggacaatcccagggcacaaaaaagccgcccggaggcggccgtttcttctttgaaacaaggtggcgaagcggacggggctcgaacccgcgacctccagcgtgacaggctggcgctctaaccgaactgagctaccgctccctgaccttgaatgttgttcctgccttgcggcgaggacgtggaggcttatacacgcctttataccccagtgacaagaaaaaaagactttttttgaaacttccgcaacctccggcggtttgtatggtgaaggagccgtgatttttcatttttccgatttatttcgacacggcaacaaattctcaactttatttgttttagtttgacaacaattaaccggttttgacataacagccccatgcttcaacctgccgtggatatcactacctccgttcacaagttcgagaccatcctttaccagtttaaaagagataacttgaatgaagtggaccagagccactatcagaagatcatggggctctccgtccggcagatgaatgccctgggcgccctgaaccggttgatgaccaaccgccatgaaggcattcccctgaagacgctcgcccaccatctccgcatgagcattccctccacgtccctgctggtggacagcatggtgaagaagggcctgtttgaccgcaaggagaacccgcgcgacaggcgttccctgtgcatccgcctttccgaggaaggggagtccaggttccagctgctttacaacggcatgaagcaacggctggacaccctgttcagcaccctggcggaggaggacaaggagaatttctgccgcattgtggataccctttacaaccacgtttacagtaaataataccatatgaaaaaacatacgcaccaacggaaggttcccctccgcctgctggccggatccggcctgcttttctctctgcttgttccgggttattcccagggagcgccgggaggggccgccaagcccagtaccgtactcgtcgagaaagcgaccgccatcgacagcgcggtgaacaagaaatacatcggccaggtggaagccattgaccgggtaaccgtacagccccgcgtttccggcaacatcgtggccacccgcttccgggaaggcaaggtggtgaagaagggagacctccttttcgagatagaagacacgcgctacaaggcggccgtggaggaagcggtggccaagaaggcccagctggaagccaagctgctttacgcgaagaacagctttgaacgctataacaggctgctggcctccaagtccgtctccatggatacggtggaaaacgccaagagcaccatgcacgccctggaagcggagatccagtccgcagacgccgccatcacggtagcgaaggatgacctcaattacaccaaactgacggcccccatcacgggacgcacgggacgcgtcactttttccacgggcaattacatcacgcccacctccggttccctggtgaccatcacgggcattgacgaggtgtacgtgaagttccccatcagcgaacgcgattttctttccctgttcggcacccaggagaagatgaagaaggacgccctggtgtccgtcaacctcgccaacggcaaggcatatgaccagccgggcaagattttcatgacggacaataccgtccagccgactacggacaccctgaacgtctgggccaggttccccaatccggaagacgtgctgacgcccggcggcgtggtcacggtgaatctttccaagaagaacgtggaccgcttcccggctgccaacatttcctccgtgatgcacgacgcctacaagagctacgtttacgtggtgaatgaccagggcgtggtggagcgccgcgacgtcacgctgggcaacacggtcaataatgaacagtgcttcagctccggcgtgaaggaaggggaagtcatcatcatcgacggcatgcacaaggtgcgtcccggcgccaaggtgaatccggtgtattccgctcaaaactgatcatcccatgattgcggacctgtttatcaaacgccccaaattcgccatcgtcatcgccatcctgatgattctggcgggcggcatctgcctgaagcagctgcccattgcggagtatccggaaatcgcccccaccagcatcaatgtgcaggccacttacacgggcgcgagcgcccaggtggtgatggagacgctggcctctcccattgaggaggaattgaacgggctggaaaacctgctttatttctcctccaagtctgacaacaccggcggttattccctgtccctgacgttcaagagcggcacggattcggacatcaacatggtgaacgtccagaacgccctgaagcgcgtggagtacaagttgcccaaggaagtgacggaccagggcatcaagatacgtaagcgctcctcggacatcctggggttcttcgccttccggtccaccagcatgagttccctggagctgaacaacttcgtcaagtccagggtgaaggatgaaatcgcccgcgtgccgggcatctccgccgtcaacctgatgccggaaaagaattacagcatgcgcatctggctggacgccctgcgcatgtccgccctgaatatcactccggatgacgtctccaacgccatcaaggcgcagaacgtccaagccgccgccggttccatcggctcggaaggggaaaacaatttcatccagtacaaggtgaacgtcaccgggcggcttcaaaccgtggaggagttcagcaagattatcgtccgcaccggacaggacggccacgtcacccgtctggacgacatcgcccgcattgagctgggcgcggagacctacacgggcagcagccgcaacaacggggaggattccgtgaacatggccgtgtaccgcctggacgacgccaacgccctggaagccatgaacggcgtgaaggatacgctggtcaaattgcaggaacgctttccggacggcgtgagctatgtcgtcagttacgaccccacgcaatacatttccgccaccatggcggaaatcgtggaaacgctgattatcgccctgatcctggtggtgggcatcacgtacgtgttcctccaggactggcgcgccaccctcattccggcgctcgccattcccgtctccctgatcggcaccttcgccatcctgctgccgctgggcttttccatcaacgtgctgaccatgttcggcctgattctggtgatcggctccctggtggacgacggcatcatcgtggtggagaataccatgcgcattctggaaacggaggacctgaccccggaagaagccaccaagaagagcatgcaccagattacgggggccatcatcgccaccacgctggtgacggtggccatttacgtgcccatcgcctttttcggcggcatggtggggaacatttacatgcagttctccgtgaccatgtgcgtggccctctgcctttccgccatcaattccttgacgctcagccccgccctgtgcgtgctgctgctgaagaagaagaaaaggaagcagagcaggttcagccccttccgccccttcaacgccacgctggaatgggcgcgcaagagctatatcaagtgcgccggcatcatggtgcgccgcgcctggctcacgctgattctgctggccgccgtgctggtcggcaactggaaactgtttgagaccgttcccaaatccttccttcccccggaagacaagggcaccgtcttctgcgacatccagctggctccgggcgctacgctgggccgtacggaacaggccatgcgcagcgcggagcagaagctcatgagcattcccggcgtgcgccaggtttcctccacctccgggttcagcttcatgggcggcaacggggaaaacctgggcatgtgcatcgcccagcttgactcctgggacaagcgcaagactccggagctttccctggattccatcatgcagaaggcttccatcctgtgcgacgagattccggcggccaaggccaccgtgttcagcccacccgccatcatgggcctgggcttgacgggcggcgtctccttcatgctccaggccagtggcgaagaaactcccaaggacctggaacgcgtgacgaacgaactgctggacaagatcaacaagctgccaggggccatgtacgcccgcagcgcgtatgaggcgaacacgccccagcttttcctgaacatcgaccgtgaaaaggcgcagagcatgcacgtgcccgtgaaccgcattttcacgacgctccagagcaagctggcctccatgtacatcaatgatttcaacctgatcggctacacgttcaaggtgaagatgcagtccgcggcggaagaccgcaccagcatcaacgacatcatgaacacctacatccagaacgaccagggccagatggtgccgctcagctccgtagccaccctgtcctacatggtcggaccgcggcagatatcccgcttcaaccagctcatgtccgcggaagtgaccgcccaggccaagccaggcgtcagcagcggagagctgatgaaccagattgaggcccttccgctgccggagaattattccatcacctggacggacatgagctaccaggaacggcagaatgacggcaagatcgtgctgctgatgggcatggccctgctcttcggctacctgttcctggtggcgcagtatgagagctggacggtccccatttccgtcatcgtctccgtctccgtggccctgctgggcgccctgctgggcctgatcatctgcaacactcccctgagcatttacgcccagctggggctggtgatgctggtgggcctggccgggaagaacgccatcctgatggtggagttctccaagatggagcgggagcgcggcgtgcctatccaggaggcggctctggaaggggcccggcagcgtttccgcgccgtgatgatgacggccatttccttcatcatcggggtgttccccatggtcatcgcctccggcgcgggcgcggcaagccgcaaggccatcggcatctccaccttctacggcatgattcttgccaccgtggtgggcatcctgttcattccggcgctgtacgccatgttccagcgctaccgtgaatgggtgaaggccctgttcaccggaaaggcgcaataacgggagaaaaaatccctatttggaagacggggcggctttgccgctccgtcttttttgcgcttcatcccatatccggggagaatgcggaaaagaagccgtcccttcccctactcgtacaagtacaggtcaaagccttcaaaccgttccttcagggatgcatggccaagcttgtcctcaaacggcgggaggaaagtatccgccggatattccccctttactttggagacccacatgcgggacatgaacggcatcatgagtgaaaaaatttccgccccgccgatgaccatgacttccgggttcatcagctccagccgttccagttcctccacggaatggatcacctgaaccccttccgccgtccaggccggatcacgggtcagcacgatgttctgcctgccggggagcggcctgccgatgctctcatatgtcttacggcccatcagcacgggatggcccgtcgtgatgcgcttgaaagtcttgaggtcgtccggcaggcgccagggcaaggctccccggtagccgatgccgcggccggaggccatggcgactactcctgtataagtaacgggctgtgacatgatggatcaaggggtggaattctaaacggaaacgggcgccttgatgtgcggcaggggatcgtaccccacgagttcaaagtcttcataccggaacccgtcaatggttttcacctccgggttgagcttcatgaccggcagagggcgcggcgtgcgggagagctgttccctcgcctggtccagatggttccggtacaggtgcaggtctccgaaggtatggatgaattcccgcgcctcatacccgcatacctgcgccaccatgagcaaaagcaatgcgtaggaggctatgttgaagggaactcccaggaacaggtccgcgctgcgctggtaaagctggagggaaagcccgtgcttcccttctcccggctgggcgggaatcacgcagaactggaacagggaatgacacggagggagcgccatgtcatccaccagggccacgttccacgcgctgacgatgtgccggcgggaccacggattgtttttaaggccgtcaatcagtctggcaatctggtcaatgggcttcccgtcgttccccggccagcagcgccactgcgcgccgtacacggggccaagctccccgttttcatcagcccattcatcccagatggtaacgccgttgtctttcaggaacttgatgttggtctcccctttcaggaaccagagcagttcgtaaatgatggagcgcagatggagcttcttggtggtcaggcacggaaaaccgtcgcgcaggtcgtacctgctctgccgcccgaacacaccgatggtgcccgttccggtacggtcttccctccccaccccgttggtcaggacatcctccaaaagtgccaaatactgtttcattcccttaatttacgcttttctaatccctggacccgtgataatacgagcatgcgctactttagtaccatctccagcctcaaaagccagccttttcaccgcttcccgccgttttccccctccgcatcttttccggtttccgttccatgatcatccctgaagagccatacttgggatttgccgccctctgccacattgcaggcgccttctgcctcattccggccctgctccacacgcgcacgccgcaggggaccatcgcgtggctgatttccctgctggcctttccatatatagcggttcccttttacctgattctggggcgacgcaggttcagcgggtatgtggaaacgcggcggaaacagacggaccccgaatcctcctggggggaactgacggataaaatcacgaactgcatgaccccatataccgtccaggccgccaatgcgcccggaaaaatcatgcacaccctttccgacatcgtgcggctgcccgtatgccgggggaactcctgccgcctgctgattgatgcggaccacgcctttccccgcatttatgacgccatcatgaacgcggagcattacatcctgattgagttcttcattatcaagaatgattccgtgggccagaacctgaaagacctgctgattgaacgggccagggccggcatccgcatctacatgctttatgatgaaatcggctcccacaagctcccccccggctacatctccgccctgcggaaggagggcgtgaacattgagcctttcaacggaaaacgccacttcctgagcaacatcctgcggctgaacttccgcaaccaccgcaaactggtggtggtggacggggccaccgccttcatcggcggcatgaacatcgggcgggagtacctgggcaagggagccctgggctactggcgggacacgtttgtgcagctggaaggcccctccgtccagcagacgcagatcagcttcctggaagactggaactgggccatgctgaaatccggcccctcctccctgccctgcctgtgctgggaaatcacgccccagcgggaggatgaaaccgtgctgatgcttccttccggcccggcggacgtcatccccgcctggaaaaccgcgatcattgccctggcgaacagagcccgggaaaggctctggatagccaccccctacttcgtcccggacgaaggggtcatggccgccctccaggccgcggccctgcgtaatgtggacgtgcgcatcctgcgtccggaacgggcggaccatattctggtgaagctgtcctccttcaccttcctccgtgacctggacacgtacggcatccaggtatgggcctatcagaaagggttcctgcaccagaaggtgatcctgatggacgacgacatcgccactgtgggcaccgccaacctggacaaccgctccctggccctgaattttgaaatcaccgccgtcatccactcccccgccgtctgcgcggaggtgaaggagatgctggagaaggatttttcctcctccaaaaaggaatccctggaggattacaacaacaaatccctggggttcaagatgctctgcaacctggcccggctgatggctcccgtgcagtagttcttgcggtgaatccgctgttgtacgcttgacctgaaagggaggctgtgagaaaatcaccctcaagaagccacctcttcaatttttaacaatagttaactaaataatgaatcctgttacattcaattgtaccgttctgcgcgacgggcaccagtccctggcagctacccgcatgaagacggaagatatgctgcccatcgcccccattctggactccatgggcttcagcgccctggaaacctggggcggcgccaccatcgacgccggactgcgctttttgaaggagtggccctttgaccgcctggacgccctgaagaaggccgcccccaagacgccgcacatgatgctcctgcgcggccagaacatcgtgggctacaccaactacgcggacgacgtggtggaagccttcgtcgccatgagcgccaagcacggcatgaacatcttccgcattttcgactgcgtgaacgatccgcgcaacatggaaacctccatccgcgccgccaagaaggccggagcccaggcccacggcaccatctgctacaccacctcccccgtgcacaccacgcagagcttcgtggacatgggccgggaacttgcggacatgggggcagacgccatcgtcatcaaggacatggccggcctcatccccccttatgtgacccatgaactggttagcgccctgaagaaggacctgaatatccccgtctggatccacacgcatgacaccgcgggcctcggcgcctccacctacctcagcgccattgacgccggggtggacgcgtgcgacgtctccatctcccccttcgccaacggcacgggccagccggactgcctgcgcatgctcgccctgctgaacggcaatccccgcaagccggattacgatgcggacaagctcattgaggtgtccgaaatgctcaagcccgtttatgaaagcctgggcaagttcacctcccaccgcaacgaagtggtggactccgacacgctccgctaccaggtgcccggcggcatgctctccaacttccgcacccagctcaaggaacagggcatggaagacaagtttgaagaagtgttcgcggaaatccccgtggtccgcaaggccctgggctggattccgctggtgacccccacctcccagattgtgggcgtgcagtccatgctgaacgtgaagttcggccgctggaagaacatcactccccaggcggcggacatcgccctgggctactacggccgcaccccggccccggtggacccggaagtgcagaagctctgcgcggaaaaaatgggcaaggaaccgatcacctgccgcccggcggacctgatcaagcccggcatggaagacctgcgcaagaagctcgcggaaaagggactccccacggacgacgaacactgcgtgatttacgccatgttcccgcagcaggtggaagacttctacaagaagccggaaccgaaggaagaagcccccgtgcaggtggacaccgctcccgccgcagctcccgtagccgctgcgccttccatgaccgtcattgacaacggcatcaccgcccaggtgagcggcccctccggttcccgtgacctgaccatcgtcatcaacgggcagtcccactccgtgaaggtggaacgcgtcggctaaaaatctccggcataccggataaaaccacttgcgggcggtcccctccatgaaagggaccgcccgctttgccatttacggattcctgaaaatccatccgccgcggcgctaacctacttggtaaaaaccagcatctttccagccaatttctggctgagggcagttgccggaattttcttgacggaaccgggcttgagctgatgggttgcccccagggaatcaactgccgtcgtgctctgttccgagtcacaggaataatactccagggcagtgctgtccttgtctttgccccaccaggattccagcacgtcctgaatggcgttattgctagtccgtaaaacattcaggtcaaataggaattttgcgccccaatggtaggtgtccgccaatttcctggacgcatgggccacattcttctgcacaacgcaccaatgagcgcgaattcctgaattatcgggtttgccagaggcgtccacgcagaaaggaaccatgcagaggcctccgccattcagcgtttcaatgatggcagtgacgtcacaggcaacagactgacacttgattttggtggactccagacccttgatataatcggccatggagggagtagcgtcatataattctccaataacggttttcccgtcctttttgaatttgttcctcagggattccctggttttgtccccgtctgccgtggcggggattttaatatcataaagatattccaagacaaaggagagggcataaagaccacaggtcggtcccctctgagacttgaattcaacgttccggccttccggattggtaactgtaatagacataattcaataatgatggcgtgggggattcatttccctcacgccgccatcacatcaccggaacgcgtctggtgcacgctccgccatgcctccgggcatctttactttccggaatgccgtatcaatcccgtggaaaggaaatgctctggaagatcacctttcccggggagccaccatgttgatgttgggaatgatcaggctgaagatgacgaatgccgccagataggcgcttccgcagaccatgaagatgatgtcgtacccatgggaggcatttccctgggcggcgaaccaggacagggtaaagcccactgccgtctggaacagcacgctgccgatctgccccgccatgccggaaaggccggtgatggatgccacgtccgacttcgggaacatgtcggaacccagcgtgtacacgctggcggaccacgcctggtgcgcgcctcccgccagccccagcaccgccacgatggtccacatgtcaaagtactggacgaagaccaccggaaccacgcagcaggcaaagacgagcatggagattttcctgaccttgttcaggctccatccacggtttgccaggaatttggtcagggtgccccccaaaatgctcagtacggtcaccagggcgtaaatgacgatcagcggcagggcggattccttgatgttatagccaaagtgcttgctgaaaaaatccggcagccagaagaggaagaaccaccagatggggtccgtcaggaagcgcacgaggatgaggctccaggactgcctgtaagccagcaatttcctccacggaatagaagccctgacttcctccttttccgcctgcgccagggcggcggattcctccgccagcttcacgcgcgggttcttcggcatccggagccagaatatcacccagataaagccgagaacgccggctgcaatgaaggcggactgccagccccacgcggcggcaatgaacgggatggtggccggagccaccagcgcccccacgttcgcgccggaattgaacagggtggtggcgaacacgcgttccccggaggagaaccagttggtcaccgtcttgatgctcgccgggaagttgccgccttcccccaggcccaggataacgcggctgaggcccatggatttggcgcctacggcaaaagcatgggaaagcgcgcccacgctccaccagatgatggaaatggcaaagcccatccgcgcgccgtatttgtcgataatccacccgaacatggtcaggcccaccgcgtaggaagcctggaagatggacatgatcatgccgtactgggcgtccgtccagcccagttcttggtccagaatgggtttcaggatggagagaatctggcggtcaaggtagttgatcgtcgtcgccgcaaagagcatgaagagaatcatccaccggaaggagtcctgccttggttgttcctggagcatgggtaaagcgcagttggttgttaaagggcgtctgccttcaaggctttcagggcttcccgcgtgcgcctgcctatttcctcccagtctccggcctcaatgaggggagattcgcaaatccaggaaccgccgcaggcggccacttccgggatttccagccaggagccgatgttgcccgcgttaatgccgcccgtgggcatgatgcgcacgcccgtatggcggaacgcggccaacagggatttaagcatcctgacgcctcccgcggtctccgccgggaaaaacttctggaacaggcagcccagggaaagtgcctggctcatttccgaggcggtggagacgcccggcacaaacaggaaatccatccctgcggcggctttcaccacctgcgggtcaaagccgggagccacgccgaacgaggctccggcccggcaggcggcctgcgcctgttccggcgtcagcagggttcccgcgcccaccagcattccggggacttcccgggaaatgcgggcaatggcttccgcggcggctggcgttctgaacgtgatttccatgcaggcgcagccgttgtccagcagcgctttggcaaggggtacggccttgtccgcgtcatggatgacgacgacggggacaagcctgatggcggataatttttccagcagtgtcttcatggtttaaaagttgaaatattgtttggcgttcctgtaggagatgtccgccgccatggagcctaccatctccatgtcgtccggaaccaggccctgcgccatgtcacgccccaggacgcggcacaggatgcggcggaagtattcatgccgcgtataactcagcaggctgcggctgtccgtcagcatgcccacgaagcgggagagcatgccgagctggctgagggtttccagatggcgggtcatgccgtccatctggtccaggaaccaccaggcggccccgtactgcatttttccggccgtgacgccgtcctggaaactgccgcagagcacggccagggcggcgttgtcccgcggattgaggttgtacaggatggtgcgcggcaatgttccctgttgagcggaacggtccagcagacggcccagcggggccatgtacgtgaaatccgctatggcgtcaaagcccgtatccggccccaggtcccgcagggcggctccgttcgggttcctgagcgcgcccacatgaagctggcgcacccagtttttcgcggaatccagctccgcgaagtagtccatcaggtagttggagaaacggaccgcatccccggaggcgatgtcaccgccccggagagcggaggcgaacagggcggcggcttcctctccggacaggctttcctcgtcaaacgcttcaagtgagtggtccgagagcttgcagccgtgacgggcaaaaaagtcatgccgggaggcgagcgcttccctgaaagcggccaaatcacggatttccatgcgggatgcctgttccaggcgcgccacccactcccgccacgcactgccctggtggacggcgcgcgccttgtccgggcggaaggtggggagcagtttgacggaatccccggaagaggcatgcctccggtgggcggacaggtcgtcgcaggggtcgtccgtggtgcagacggtctccacgttcatccttttcaggatatccagcgcgcccattcctccggactgaagcatggaggaggtttttttccagacctcgtccgccgtttccggactgaacagaatgccggaaatgccgaaggggcggcgcagttccagatgcgtccagtggtacagcggattgcgcagcaggcgcggcaccgtagccgcccaggcgtcatacttttcccggtccagagcgtctccggaacagaggcgttccggaatgccgttcgtcctcatggcgcgccatttgtaatggtccccgtccagccagagctgggcgatgttggagaactggcggttgtccacaatggcggcggggtccaggtgggaatggtagtcgatgatcggctgtccttccgcgtactcatgaaaaagcgtcctggcctggggagtgtccagcaggaaatcgtcgttgataaacatggcggcaaacgttggcggttatactccggaataggccagaaagcccccgtccacgggaatgatgatgcccgtcacgaaggaggcggaaggagaaacgaggaagcggagcgccccgcagaggtcctccggctcaccgaaacggtgcatgggagtcttggcaagcactttgcggccgcgcggcgtgggggttgccccgtccttttccatcatcaggaagcggttctgctccgtgatgaagaacccgggggctatcgcgttcacgcggacgcccagcggggccagatgcgtagcgagccacttggtaaaattgtccaccgcggccttggcggctccgtacgcgcccaccttggtgagaggctggaaggcagccatggaggagatgttgacgatgcacccgccggaggcggccagcagttccccgaacacctgggaaggcaggatggtgccgatcatgttgaggcggttcacgtactcaaagccctccatgtccatgccgaagaagccttgatccgccggagtgtccggcatgcattgctccgccgggctggttccgcgcgggtcattgccgcccgcgccgttcaccaggatgtccagccttccccattcttccttcacgcgggaacaggcctgttccagagcggccttgtccagcacgtccgcagccagcaccagcgtccggcccagaccttcctccgccagcttccgctggaggtcttccagcttggagcgggtacggcccaggagggccacactggccccggccttcagcaggtcacgggccatcacggaacagagcacgcccgcggccccggtcacgacagcggtttttcccgccagcggacggaaggactggagccccatcgccaggccgcgcagttccgccaggccgatcacgcggccgccgtaggaatacccggcatagcagtgcttctccaggtcaatgtccatcagcttcccatggtccgggcgcaccggaatgcgccagtccggccatcccgcggccttgcggcgggcttcctcgtccagcaggcactgcatggcataggccatgtccgtatggccgcaaaggtgggaaccggattcccggaagctttcatgatccgcgtcaaacaccgtattgcggaagtgggcgaaatacaccctgtccgcaaactcctccatcagcaggtgcggcgcattggaataaaggccgcccagggagccggtgcagagcgtgaagccggaatgcatggagggaacctcccgcaccagttggcgcatgtcctcctcatcactcatgatgcggggaaggccgaagatggggcggggagggtcatccggatgaatggccatgcggatgcccgtttcctcgcacacgggcatgatttcattcagaaagtcatacaggttccgacgcaattgcgcatcgtcaatgccctcgtagcgtttgagcatttccctgaactgctccggcgtcaggtcatccaccgtgccgggcaggcccagcaggatggaatccgccagcgccttgcgggcgtctccgtccatggactggaaaagttcgcgggcgcgcgcaaccgtttccggcgcgtaattgtccgctgcccccgccctctccagaataaataggtcaaacgcggccacgcggacggcgtcatacttcaaaacgctgctgccgtcctccagcggaaaagccaggtcggaacgcgtccagtccagcacgggcatgaaattgtagcacaccactttcacgcctcctgcggccaggttgcggaggctctgcttgtaaacctccagataatgcttccagtttcccgaacgcgtcttgatgtcttcatggacggcaatgctttccgccaccacccatttcatccctgcttcttcaaccatccgcgcgcgttcggccacggcctcccgcgtccagagttccccgcacttcacttcatgcagggccgtcacaatgcccgcggctccggcctggcggatgtccctcaacgtcacaggatcacttggaccgtaccatctccagctttcaatcatgtcaggaagaattaaagggttaacggtccacgcgggcggttccgcctttcatcactttttccacttccgccagcgtggccgtggaggtatcccccggagtggtcatggccagcgcgccgtgggcacagccgcagttcacggcgtactgaggccccttgccggacagcaggccgtaaatcaggccggaggcaaaggaatccccgccccccacgcgatccaggatttccaggttcgggaaggaaacggaatcataaaattcaccgtcgtaatacagcatggccgcccagtcgttcagcgtggccgttcgggccacgcgcagcgtagtagccgcggccttgaagccgaactccttgacggcacggcggatcatccggcggtaggactcatggtcaatgcgggaaaaatcctccgtgctcccttcaatggaaagtcccagggacgcctggaaatcctcttcattgccgatcatcacgtccacaaagggggcgatggcccggttcacctcctgcgcacgggcctgccccccgatgctcttccagagggaggggcggtaattcaagtcataggaaacgatgctcccgtgcctgcgggcggcctgcacggcttcctgcaccacggcgctggtcgtttccgaaaggcccgcgtaaatgccgcctgtatggaaccagcgtacgccgtccctgccgaacaaggcatcccaatccacctcgccgggcttcatctggcaggcggcgctcaggccgcggtcggaacagcccacggcggcgcgcactccatagccgcgctccgtaaagttcagacccacgcggcaatcgcggccaatgccgtcaaacggcttccaggacacgtaatccatgtccaggccgccctggagcatgcagtcttccagcaaacgccctaccgggttgtcgcaaatggcggtaacgataacgccgcgcatcctgaagcagcgccttagcccgcgggctacgttgtattcccctccgccctcgcacacgcggaaagaacgggtggtatggatgcgcccttctccggggtccagcctcagcatcacttcacccagggaggcaatgtcccagcggcattcctgttctgatttaatagttaaagacatataaaagcatcaaatggtacggttctgcttagtataaaagaactgtttttctccacaagggaaaacggcagaaaaagaccagacatgcggcagaatattgctattgaaaatgttccaccctgcggaaaatgtctttgccgaataccttggggaatattcttcatcccgtccaacgcctggcaaccttctacgatctccacgtttccaggccttcaacctttaaaaaatgggaatcattttttctcttccatcctccggcaattccttccacccatgaatcaatgccttaactaacagtacgtttgacggtttatcttctttcctataccatcctgccgtgagccgccatccccgccccatccgttccccggaagaaattctgtccgcaaagcttcaggcgggagaggaaatcctgtggacggcacatccggaagaacgcctctgaacctggaccgtcgtaaaacggctgctgcaaggctgcatgctgctggccgtgttcatgacgggaacaagatgggtatggtcacactcaggcctggcgttcctgcttctgctcctggcctcacttcccgtttcctatattctcctgattttcttaattaactttctggcggccccgtggctggaacgcccgcgcagacggaacagcctttatgccgtgacgaaccggagactgatcaccatcatcaagcccaacacgctgttcatcacggagacagtccggacctatcctatccgcaaattgaaatacgtgcaccagaaattgcacaaaaacggcacgggccatctcattctgggatacggcaggcgcaggcaattcattattgagaacgtaccgcaacccggagaggttgcggacctgctgaaaaacagaatcaggaagggaaatcttccctcctgattgaacactgttttttcctcccctgcctattctccttcctgcctcatcagggcgaactcccgtctggtggtccgccttacccgccagagcagaagcacggcagccacggacaagccgatgatgaaccctatccagatgccgcgcgcgcccatagccggaacaatccagttggtacgggccaggatgtagcacaccgggaacccgacgatccagtaggaaaagaaggtgatgacggtgatggaagccgtgtcccggaagcctctcagcaccccgacggagagcacctggaggcagtccggaagctggtaggccgccgccagaatcagcaggacggaagccgtgctgacaatcatctccgaatcattgtacaagtgcacgatctgctcccggaacagggtgatgccgccaaaggtgcacaggcagatggtgagcaccagcacataggaggacaggacggcggatttggtgcccgccaggtccttcctgccgtggtggtacgccacgcggatggaggccgccagacctacggagagcggaagcatgaagaccaggccgcccacgttcccggcaatctggtggctggccacctgcgtttctcccagcggggccagcaccagcgcggccgcgcagaagagcatcacctcgcacaactgggaaacgccgatcggcacgccgagccgcatgaggtgagtgatgacggaaggcgtgggacgccgccaggaaacgatgtgcctgcggtacggcctgtgcttgggattgaggtagaccagcaggaacatcagcaggaattcaatgtagaagatgactgccgtggccgcgccgcaccccgctccgcccatgcggggaaaaccgtacaggccgaagacgaagatgtagttcagcgggatattgagcagcaggccgcacagccccacgtacatggcgggccgggtcatgttggacccctcgttcaggctcttgagggccacgaatcccaggttggcgggcagtccccacataatggcgaacatgtaggcggaagccatctggcacatggcgacgtcatcggaaatccagccgaacacgtttctcagcacataaatgaccggcatggaaaccaggctgagcatcagcgccagccacaagccgtggttggtcatgtaacccacgcggctttcatggcttttcccccgcatgttggcaatcacggggccgatgatcatcagcacgccgcaggcgaacagcgctacaggcagatacacggaagaccccagcgctacggcggccatgtccgtcactccggcgcgcccggccacaatggcgtccaccgctcccatgcccacaatggagaggttgaccaccagcaccgggagggctagcggtatcagttttttcatctccttcaaattccacgtcttattcatttctttctttccttccatgcattcctccttcagggagccggaacatgccggcaaacaagccggaccggagcgacaggctccaacccggcttcaaggttaagggtatcaaccggaccggggcctcctgccccgtccggacattcagcggtcaagcaccacacgggcgcattgttcagccacctggcggaacgcggcggaaaccgggttctgctcagggtcttccagagctacaggacggccttcgtccccgccggagcgggtggcgatgtccagcggaatcttgccgaggaggggcacgcccagcttggcagcttcccgctcgccgccgccttcgccaaagatgtggtaaatcttgccgtcggaagggcattggaaataactcatgttttcaatcacgcccagaatgggggtttccacccgttcaaagaggccgatggccttgcgggcgtcaatcaacgcgacctcctgcggggtggtgaccaccactacgccatccagttcagccgtctggacaatcgtgagctgaatgtctccggtgccgggcggcaggtccagaatcaggaaatccacgtccccccacgccacgttgcgcaggaactgctgcacgtagcgcgtcgccagggggccgcgcaccgccacaggatcggattcgttaatcagcagccccatggaaaggagcttcacgccatgggccgttaccggaagaaattcgtcattctcattggcgccgggacgttccttggtgccgaacatcagggacatggaagggccgtaaatgtccaggtccaccaagcccacggaatagcccagcttgctcagggccaccgccaggttggcggaaacggtggatttgcccacccctcccttgccggaggccacggcaatcacatgcctggcgccgggaacggaggatttccaggtggaggggtcatcgttgattcccttcttggcttccggggccttgtgctcaatgttgacgtcgcaatgcttcacgccgggcaaatgcttcatcacgccgtggacgccttcaaaaatgtaacggggaatatccgcattcttgctctcaatcaccaaatcaatcgtgacgttgttttcagcgtcaatgtcgatcttcttcaccagcccgaaggatacgatgtcgcggctgaaacccgggaatttaaccgtggtcagcgcggcccgtatcagctccggagtcaattcctgttgtgtcgtcatgtgtctgaaatactaatggttgccataaacattccgcccccgcgcctccggaacgcagcatgcgccggaatacagagataggggacggcaaaaccgggaagcaaaaatactcccttttttatttttgacaacgcctaattcagacaaagcaactttttgcctgccggatattcacctatccggatacctgaaaaatgcgggacagccacagccccgctatcgttaaaaagaagaaaaaacagggggatttattccccctgctgcttcagcgtttcccggatatcctggagagcggcgatgaaatcatccagaatttccgcgggaaccatgatccggtcccggttggaactcaccttttccgtaatacgcaccactttgccgcgcgcattctgtttgagatcaagaaagaacgtcttgcgttccgcaatgattttttctgtgcaaataatatcgtcctccacggctgtaatcttcctccggttgaatgaggctttcaggatagagtttccctctcggcgggtcaatgttttatttgcaagggcagatacaccgaaacctacgggcggggatggacggaacagcactccttccaccgtgtttttagctgcaacactgaaataattaacaaacaatctctaagaatcatacttcaagatcaactctaacaaataataaaatggtctcaaaaaatgaacacaacctagccgcctcatttatggcaagcaactatcaggaaaatttctgaaaactcttttattctttcatctgacgacgtgtttttggttcgttattcttctcataaaaaatgtttgacatgattatttcctgcaccattattttatttcctttatagttcatgacttatgttgaaaataagaataccttctcctcttttgtacggtatgattttttcttcctgttttgtgtttcagcttgccgcagatgacaccgaaccttcagaaaatatcatggaaatcatctcagaaacgtccaactattcagccaggattgcacgtaataaagatgctactgagaaagaaaaagaaaaggacaaagagcgcaaacgcattggcattggagaagaggtaacagtaaccctaatcagtaaaaagaatgtccttctggagccaaaagagaagatccaatggaaagtaaaaaagggaaaagaactaattatgggagagttaaccaatgagaaggataaaccagaatcagcaaccttccaaataagcccttataccagcaaagagcaaattcaacaagccggtggtcttgttatagaggttcaaacccagcagggaatagctcttcctgagccaatcgaattcgaagtcgtttttcccgaacaactcaccgcagaacatgaaactctgggaggcatcctcaaaggagtatctttacctgattgtcctgaaaacggtagtaatgttccaggagcttccgctgcacttcaagtatcagttcatcctcttgacgtatgctatgctggagtcaggattatcgaaaaagacaaagggttcgaaggtccggtgggaagccttgccgaaaaacatgatgctgacagtaactgtattattaccaaggaaaaccgtttcgaaaaaactgatcatatacgaagtaagatatctcggaaaatcttgaatgaaatcaagtcccttgatgatcaaggaaatcccatttacaagcattcctatcccaatgaattcacctggaaatgtcttttcaggacgttcaaatccccagacatgaaagggatttgcgatattgctactgtttaccaacgtttccatattgacaggaagccaaacgatcaattttatataagagttaagaaatttcttgtcgatccgcaaaaaaaagaagaatgctctgttgaacgaacgacgggcggtaatcatattttcaaaccataatattctcttgtacttatgcatcccattatacattccctttccatgattgtgatgacgttcctgttgacggcaatcccaaacattcaggcagcagagtccatcatgaagaaatttcatatccctgttagtgaacaagcccggaaatttaatgacgaaccttttttaaaaaaactcaagttacttttagaacaaggagaattggagaaattctatgaaacggtaaaacccgccattgaccagcatgaattatacacagatcctaaaatactagttggagaccagatagatagacaactgctgattgacagctatgtcgtttcagctcctctttttgaaatggaggaaaacgaccctctccacgagggcagctttttaaaaagcgatattaaactcaaggaaagagtcatggatgatctgtacattatttcaaaaacaaatctcgcacaaaacaggccgccatcccaaaaaaaggaaacagctcgattatgttccatctatgcagcaattacggtacggacgctacgcaattattaccggcccaatatagaagaagaaaatcgcaactaccagaaaaagcgggaaactgcgtggcaaaaggccttcatggacaaatggagccaattcgttaaggaagaggaattatacgagaggaattggaaacagcctgaaagtgaggcagacaaagccaaagatcaggaaatggaagaaaaaagaaaagcctatgagaaagctatacgggaaaaatacgataaacaaagagatctggccaataaaatggtggtcaaggaactcagaaattcttcaattgaatggtattttcaccgccgggaaggaatcctaatcaacatacttcttcttaattatcctgagaaatcctctgaaatatttaattacctcaagatggcaggttatgaagaaaaagaaatgatgccgttggttgatcgagcaatcggtagaaataaaaaaacagagtttctatatcaaagtaacttaggacgaaaatttcttaaagaaaaagagaagtaaacccataaaaaacagtagagaactactgtcctgcttttacagttgagtccaagtacgcctggttaactcaatgagttaaccaggtgtagtgcgttattccctctaaaagacaacaaatttccgtaacatcagcattccgcgcgccatctggcctgctccgtcttgtagagcttgtacgtgacggcgtccgccagggcttccaggctggcctcaatgatattgtaggagacgcccaccgtggtccaggtggcgacgccgtccgaggattcaatgagcacgcgcacattggagccggtgccgttttcctccgccgcgtccggaatgttcgtccgggtgggtgagagcacgcgcaccttgtagtcaatcaggtgcatttgttccagttccgggtaccagcgcgtcaaggcgcggcgcagggcgcggtccagcgcatgcacggggccgaagccgccggcggcggtgtgctccacgttgccgtggacgtccagcttgagagaggcttccaccatcatgtccggatccatttcatggcgggaggtaagcaccacggtgcgcaggatgttgaagtacggcttcagcgcgctgtccggcatgtgccgcaggaagagcagttccgcgctggccggggcagccacgtagtcataccccagcgcggcgttttttttcacggcggcggagagcacgtccagaagcgggtcccctttctccagttcaaagcccaaggtacgggacagggaaaggatgttgcttttgcccccctgctccgtcatcagcacgcgctgggcgttccccaccagggaggggtcaatgtgctcgtacagggcggagtccttcatgatggcgctcacatgcacgccccccttgtgggcgaaggcggcgttccccacaaagggctgccgccggaagggggccaggttggacacttccgaaacgaaggcggcggtggatttgaggcgcgtcagggaggcgtcactgaggcaggaaaagccctccatcttcaactgaaggttgggaatgacggagcacaagttggcgtttccgcagcgttccccgatgccgttcacggtgccctgcacctggacggccccgctgttcacggcggccaggctgttggcgacggccagctcgcagtcattgtgggcgtggatgcccagggcggcatgcggaaggcgttccctgaccgtccggatgatggaaccgatttcctccggcatggtgcctccgttggtatcgcacaggaccaggcagtccgcgccgtgctcatgggcggcgcggagcacggccagggcgtattccgggtcccgcttgaagccgtcaaaaaagtgttccgcgtcaaaaaaagcttcttccaaattctttttaaggaaggagatggagttgccgatgatttccagattgcgttcccgggagatgcccagcgccacttccacatggcgggggcaggatttcccgaagatggcggccacccgcgcgccgctggaaaccagggcgttcagcgtggggtccgtctccggcgtactggacggatggtgcgtgctgccgaaggcggccagcttcgcattcctgagctccacgtccttcatggccttgaaaaattccgtctccaccgggttggcgccgggccagccgccctcaatgtagtccatgcccagataatccagctgccgggcgatgcggaccttgtccgtcgcactcaagttgacgtcttcactctgcgctccatcgcgcagcgtggtatcatagaggaaaattttggtggacatcgcctttgttcatacatgcaaacgcggttccgttcaagaccggggcccggtttttccccggatgcagacacgaaaagcacaaggcttgaagggggagagggcttccggtaggatagccgccatgcggttacccaggcagtttttccatctccttctcctttttctttccgcggcccttccctctccggcggattcttccacccacccttttctggacaagagccgccccatttgctggaaccgcctgaccccggacaggctggaaccggacatccgggaagcgatgcgcctcacccggtccgccgtggaagagatcagccgtctccaaccggaggaaatgacgtatgaaaacacgttcggcgccctggaatgcagcaatgacctcctcatggaaggcatgcgcaaggcctatgtcctgaaaagcctgtgcgacagcgcggaactgcgcaaggccatggattcggttgcgccccgcgtgtccgccttcctttcctccgtcacgaaggaccaggccctgtggaacgtcctgaaaatcgctgaggaacgcctgcggcagaccaatccgggcccggaacagaaacggtacatggagctgaccatgcagagcttccgggacaacggggcggacctgccgccggacaagcgcgcgcggcttgaggtaattgacagggaattgactctcgcctcacagcgtttcaacaatctgtacatggacgcgcggaagtcctggacctggacggtgcgggacgccgcctttctggaagggatagacaacaacgctcttcaacaggcgcgggaggagttccagtcacgcagcccaggccattccggcccgggctggacgtttacgctggattccgcggcttccgcccgggtgatggagaaggcgcaccgcgaagaatgccggaaggatttatgggaacatctccagaccgtcgccacgggagcatgcgatacggaacccgtcatccgggagattctttccctgcgccgtgaaaaggcgcatttgtgcgggtatggaacgtatccggattacgccctgcgggagagcatggcgggaaacggggaaaacgccatgaagttcgtgaatgagctgctggacaaggtaaaagccccctttttccgtgaaatggaagcgctgcgccaactcaaggcccgtctcacgagacaggaaaacgcccgtctgaatccctgggacgtggcgtattacaccagcctccaggcaaaggaacagttccggctggaccaggaggaactgcgccgttacttcccccttccccgcgtgctggacggcctgttttccctggcggagcggttatacggcatccgcgtggcggaggttccggcaggggaaggcgcaggagccgtggggacctggcatccggacgtgcgctttttcaccattgaggacgtcaggggcaaccgcctgggatccttttacctggacctcttttcccgcaaaagcaaaagggtcggagcatggatgaacgcgctggacacggggagcccggccacgcgggaaaacccgggcaagccccgcctgggcatggtctgcctgaaccttcatccctccgcagaaggagctgcggtgcttctttcacatcaggagaccaggattctgttccatgaattcggccatttgctgcacctgatgttcacccgggtttccattccctccctggcagggaccagcgtgccgcgggattttgtggaggttccctcccagttcatggaaaactggtgctggcatccggacgtgctgaaaagcttcgcgcgccatgaaaaaacggggttccccattccggaggaaatgctgcgctccctggacgcttcccgcggcaatacgcccgccctcgccctggccgggcagctcctgtacgcaaaaatggacctggccgtgcacacggacccggaacgcttcgccgccggccccctggacgaggtggacgccgccgtagccggagacatggattatttcaaggatttcaaacgaaccggcaagctgcgcacggcgcgccatttgttttcctccccggcgggttatgcctccttttacttcgcctaccgctgggcggaagttctggacaaggacattttcgaagcttttgaacgggccggaggaccggacagggaaaccgcccggaaattccgtaaggccattctggaaaagggatatacggtcccgcccatgcagcagttcatggatttcatgggcagaaaaccacgcatggacgccatgctccgcaagaggcggctggcctcctgaacgaaggcgcggataggatcgccgttccgcctccgcagaggagcatggaggagtcaacatattatacatttgtttaattaaattatcccttcaatatgcaaaggttacggatatttcacaagaatcagaacacatctttgcgttgactttatgagaaaaagaagcaaaatttgctcgctctgccgcatcttccggcaccagcttgcaaccaaccgcatccatttatgtacaacaagcctttgacgattgccgccacaactctgctcctgtgctctccggtgatgattttaacttcctgtgaagggaaaaaggattcagcaggccagatgccggcgctcgttcccgaagtgcaggtgaccaagctggtaaccagggacgttcccatcaggcaggagtgggtgggcaccctgcgcggtacggaagatgctgaaatccgctcccaggtgacgggataccttctttccaaggattacaaggacggcgcctatgtgaagaaaggccaagtgcttttccagattgatccccgcccgttccaggcaacgctggaccaggcccaggggcgcctggaacagtatgaagccacgctgaagaagtacaagctggacgtggaacgctacacgccgctggtaaagaccggctccgtcagccgcaagcagctggatgacgccctgcagcaggtccaggaaacggaggctgccatcgccacggcaaaggcccaggtggacgaagcgaaaatcaatcttaaattcaccaccatcacggcccccatttccggtctggcgggcctggcaactccttccatcggcaacctgctgacgccctccagccccaatccgctgaccaccatttccgccattgaccccatccgcgtggacttctccgtgagtgaacaggacttcctgaactccatggacagcaacctggccaaggagaagcacctcaagtttgacgtcattctggccaacggcacggaattccccatgcagggcgaacccgtagccattgacagaaacgtggacgcccagaccggcacgatcaacatcgtgggccatattcccaatccgaacctgacgctccgtcccggcatgttcgtccgcgtccgcgccacggtgaagactttggaaaacgccacgctggttcccccgcgcgccatcctctccgcccagagcgccaaattcatcatttatctggatgacaagaacgttccccacatgcaggtggtgaacctcgggcccgtggtggacggcatgcaggtgatcaacatcgttcccatgccgcactcctccttcacgaaggacagccccatcgtagtggaaggaatcatgcaggcggccaagctccagggacagtcccccgtgaagcccctgccctacaagcctgtcgtttcccagcccgtcatgccttccgtaggagcgcagtcctttgaaaaggccaagacgcccgaaggcatgaagcacgacgaagcccagcccgccgccaaataatccccccctctcctgggaagcccctctcccctccccgcctttcccgcgcactctcatgatttaataccatgtccagcttcttcatcaaacacccgaccatcgccatcgtcatctcgatcgtgatgatcctgctcggcggactgtccctgatggggctccccattgagcagtacccgaacatcgtcccgcccaccatcaagatgcaggcgacctatccgggcgccaatgcggagacggtggccaactccgtggcctcccccattgagcaatccatttccggcgtcgtggggatggactacatgacttccaccaacgccaacaacggcatctgctccctgagcatcgtctttgaagtgggcacggaccccaacatggaccagacgctggcctacatgcgctacgggcaggccaccgcccagatccctgcggaagtctcccagatgggcatcaccatcacccagtccacgggcagcccgctggccgtaatcaacctgtattccccggatgacagcctgaacgccatcttcctgagcaactatgcgtacgtgagcctggtggaccccgtgaagcgcgttcccggcgtgggcgacgtgcaggtgttcggcgcaggacgctacgccatgcgcatctggctggacaccaccaagatggccgcccagaacatctccgtgggagaagtccagtccgccatccgggcgcagaacaccgtgattcccggcggccagatcggcgcggaaccggcccctcccggaacgggattcacgtacagcatccagaccaagggccgcctccagactgcggaggaattcggcaacatcatcatccgtgcggacgggaacaagctcctttacctgaaagacatcgccaaggtggaactgggttcccagacctacaacgtatccagtaaatacaacggcagggattcaggcgccatcgccgtgtatgccgcccccggctccaacgccatcaatacggtggacgccctggtgaagctttttgaagaccgcgcccgcagcttccccgccgggatggagtacaacgtgacgctggacaccacgctggccgtgcgcgcctccattgaggaaatcgagcacacgctggtggaagccctcctgctggtggtgctggtggtgttcgtcttcctccagggctggcgcgccacgctgattccggccattgccgtgccggtctccatcatcgccaccttcgcgctgttcccgctcctgggcttcaccctgaataccatctgcctcatgggcatggtgctggccatcggcctggtggtggacgacgccatcgtggtggtggaagccgtggaatcccatatggagcgcggcctcacgccacgccaggcggccttcgccgccatggaggaagtgtccggccccgtcatcgccatcgccctggtgctggcggcggtgttcctgccctccctgctgctgccgggcattacgggcacgctgttccagcagttcgccgtgaccatcgccatttccatgctgatttccgcgttcaacgcgctaacgctgtccccggccctctccgccatcctgctcaagcccaaggacccgaacaagggcggcccgctgaaattcttctaccgcattttcaaccgcggttatgacgctacggccagcggctacaccaaggtgtgccacttcctgacccgcaagctcatcatctccattcccctgctggccctgatcgcgtacgccatcctgcccgtagccaagcagattcccaacggcttcctgccggacgaagaccagggttacctgttctccgccctgatcatgccggaagcccgctccctccagctgacaacggccgccgcggacaaggtttcagacctcatccgccagaacccgaacgtgaaggacgtgatcgccatttccggcttcagcctgctgaccggggtgcagagcacgaacaacgccttcttcttcgtcatgctgaagccctgggaggaacgccccaatccggaccagagcgccaaggcggtcaccgcccagctcaacgccctgctgagcaccaaggttccggaaggcatccccatgtgcttccagcccccggccattgcaggggtgggttccgccaacggcgtcaccttcatgctggaagaccgcgacggcaagggcacggaatacctggcggaacaaacggacatttttgtgaaggaagccagcaagctcccgatattcgacccgcagaagaacggcggcgtgcgcagcgtgatgtcctttgccgtggaacagaaggacgtgcggctggatgaagaaaaatgcgccacgctgggcgtcagcatcagtgaggccaacagcctgctccaggcctacatgggctccctgttcatcaactacatcaccctgtacggccagcaatggcaggtgtacatccaggcgcagggcagcgaccgcaccggaacggacatgctcaagaacttctatgtgaagaatgactcgggcagttccgtccccctctccaccctcgtgaagatcacggacatcaagggtccggaattcctgctgcgccagaacctgtacaactcctccaagctcatggtcaccccggcccagggctactccaactcccaggccatggaagcgctggaacagacctttgaggccagcatgcccacggacatgggctacagctacgcagacatgagctatcaggaacaaaagatccagaacggcatcggcatcgtgcagatcttcctgctctcctccgtcttcgtcttcctgatcctggcggccctgtatgaacggtggtccctgccgctcagcatcttcatgacggtgcccatcgcggccctgggcgctttcctgggcctgtactggttcgggtatgaactgaacctgtacgcgcagatcggcctggtgatgctcatcggcctggcggccaagaacgccatcctgatcgtggaattcgccgtcattgaaatggaacgcggcaagacgctgatggaagccacgctctccgcggccagaatccgtctgcgccccatcctgatgacctccttcgccttcatcctgggctgcgttccgctggccctggcctccggttccggcgcctactcccgcaacatcatcggtattgtggtgattgccgggatgacgatggcgacggtagtgggcgtcttcctgatcccgtgctccttctacttcatcatgaagcttttccgtgtccgcatcgcccggaagacggtggaaacggaggatccggatgaaatcatcgcccggaagcacctcttccatgaagcccatgaatcactgaaagggtaaaaaccgcccttgaaaccatttaaaaacagacaaaacgccattatgcgaccgaaccaatacatcacacgcgccatcctgctgggcacggccatcacggcttcctcctgcatgatgggtcccgacttcaagccggtggacatgcccatgcccacggcgttcagaggagcctccgcggccacggagtccattgcggacctgccctggtggaaagttttcaagaacaaggatctccaggacctcctgacggatacctaccaaaacaaccgtgacctgaaggccaccatggcgcgcgtggaaaaggcccgccagtacatcaccatcacggaagccccgctcttcccgtgggcggattattccggctccctcagcaagggctccaactacaccagcggcaacgtggtccaaacctccgccgttggcaataccttgacgcccggatccattgacgccggcatctcctgggagctggacatctggggcaagacgcgccggatgacggaagcggcccgcgcagactacctcgcttccgaagaaggccagcgcgctctcatgctctccctgctccgccaggtggccgactcctacctccagctcctccagctggacgaacagcttgccattgtgcagaaatccgtggaatcctattccgaaagcctccgcctgttcgacgaacagcttgaaggccaggtgggcgacaggctccaggtagcctccgccaaggccgccctggcttcctcccaggcacagattcccgccatccagatgcagatcgccaatctggaaaacgcggtctccgtcctggccggacgcgctcccggccgcatccgccgttccggcagcacccgtgacatcgcctacaacgtgaaggttcccgccggcattccggcctacatcctttccagaaggcccgacgtccgccagagcgaataccagttgcgcgcggccaacgcggaagtgggcgtagccattgccaactatttcccgaccatttccctgacggcggccggcggcctagcctccgcggacctgcgccacgtgcagggccgccgcggcggctggggctttggaaccaacctgaccggccccctcttccaggcgggcaagctgacggcttccgaaaaggcagccaaggccggattcctggcagccagcaacgactatgaacagacggtgctgaacgccctggcggaagtctccagcacgctcatccagcgggccaagctgcgcaatatcacctccatccagtcagaggccgtggaagcctaccaaacagcggtgaagctctcctttgagcgctaccgcacgggcctttccaactacattgaagtgctgtacgcccagcagaacctgtaccctgcgcagattcagctttcccagtactactatcagcacgccagcacgctggtttccctgtacacggccctgggcggcggctggaacatgagccacaaggctatcatggatggcccgcccaagcgataaaaaacgctcctcccttaaaatcgggagtttccttgactgtttttttcattccccggcaagtacaagcttgccggggaatttgctctccggcggagcggaaaacaggcgcgccgccttcccagtccctggcaggccgggcatccgcggtcttcccgcttccggcagaagggattgatgagtccggagcgggacggtcaatggattatccactgtttgcgccgcttcacggattgccgggcatcgcatctcctgcccacctcctttttccctttccccggctcgggttccgcgggggacggaagcagttttggaattgatttggaaccaattcatttacaatcaagatagcgtaaaagaattgcatcgtgtttttcaggaattaattatccacgatttttctattccataattacgggcaactccatactgctcctgctcttacagctgatttcaagcgcctgggcggattcctaatccgtcaacaattaaaaatattaacggtaaatgtattgtttatcataaaatattgatattcatcataatttaaaagatctggtcttttcaggacaattccttttcccatgattctctagcctttatccatgcttgcattggatgggtccacaagcggattaggaattcgataaaaaacggacgttctcttgcgcgggaacatttctccaatccgtacagcaatcaatatgaagaccacatacctgaccctcctggccgccgttctgggaggcagtctatccttcgccgcttccatcaatggaatggatccctcttattcaaagggttacaccatttatgacggaagcaacggagacaccctgaatgtttcctctccctccgtgcccgtgcataccggctccggagccactccatggaccatggccctgaccatttccgacctgggcaccacctcggggacggatgtaggcctgctgtttacctataataccacctccaattacaagaacctggaggggatgggttaccggctgacggagtcgggagacctcactctatgcgcaggcggctttaactacaacggaggcacggcaggcacctccccctggaaaacgcaaacgctttccggctattccgcaggacaggcccttaccctgttttacacatacaatgacgggaatgtcactatttccgccatgctgggggacgatacgtccaccctgaccactctggcctccctgaacggctccggggtcaaattcggcagcgtcaccatgaaccagctcaatttttccgccaaggacggttccggaaacacctggactcctccggacggcgtcaccggggaatataccctgaacaattttgacctgtacctgggagcactgacagaagaccagatgaaagaatacgccttgagcgccgttccggagccggccgcggcctccctcggcctgctgggcctgggcatgctgctggtacgccgccggagagcctagccttttccagccacggccatccctgtccattcagggatggccgttttattcacttttttcaaacatccgtttcattcccctgctccccttgatgaaaaccaggctccctctctccctcctggccgccctgctggcggttttcccctccgccatcgccgcccctgcgggcacggacctgggcaacgtcatgtacgtaggcgattccatcacccacggcatgaacagcggcacttaccgctgggccctccataaaatatttgcggacaacggcatttcctaccatgcggaaggcgtgaaaaccggcaactattccggaggcgtcaccgcgggaacctcctacggcggccaggttttcaacaacgaacattcctcccaggcaagcgcaagggcctgggaaatatccggcaggaaaaccggaagcaggtttgacggctccaacatctccaactggctggggctttccgatgccaaagcaaacggagcagcctaccagggcccgaccttcacgggaacggacacaccggatacctttttcgtgatgatcggcaccaacgaccttctctccgacggcgacaattccaccctggacagccgtcttgattcagtcacccgggatcttctggcggacatggacgccatcgtagacaccatgcacgccgccaacggcaacgcgaacgtcatcgttctcaccattccctgctggacccagcattccaacggcaattcggacgccacccaccaggcggtggaaacctataacgcctccctgaattcctgggggcagtccaggcagggcgtcacggtcatcgacgtcaacagagggatcattgacgtggcttcctccaagccgttttacggggtgcggtccatgttcaacaatcccgcggcggacggactccaccccaacacccagggagacctgctcatggctggcaacatcgccaaagccatgggctatgcgggccgctctgccggacaactgcgccgggacgccggggaaatggccgtcaacttccaccagggcgcaggagcgcccgcatggaccggagtgcagaacctggcggatgcgggcttttccgtatccaacattggcgtgaacgcggaaggaatcagcctgggacaggcggggacaagttccatttcccggacatggacggagggaacggccctgaaaaacggctttacctttgatttcaacctggtcctgggagacggggcggcaaacggctggaatctctcggaccagttcagcgtcagccttgggaacggctctttttacggcacgctcaacattaacgaggcctatatcaaatggggggataccatcctgtattccctggacatgtccgccaatacggaaaacctgcgcatggcctacgtcacgggcaatgagcaggaagggctgaaaggcggctattacgtctggctgggggacatgctgatcggggaagcgctttccgtcacctccggttccggctgcaacggcgtcatcatccagtatgacggcagcggaaacgccatcctgaaagacctgtccatggatggcacaggatcgtatgccccacccacttccgggctggtcaatgaagagaacgcctttatttccgccggagcggactccgggggctcgtcaggcactccggagggcaacatcgcgtggccggaaactggcttcacgcattccgccgccaaccagaattgctccggcgtcttcgatgcccgcgcccaggcggacgcctcctccgggaggctgggaaactccgtgaacgtcaccatcacttccggaaacgccacgcatgtgtatgccagcaccggcaattatacgggggacatctggctgaccatcgccaaggaagggcaggcctccgcctggtacggggcccatggaaattccggaacgctgaacgggaatgccgccctgcgctttacggacgccgccacgggcggaagcaccgtcttcggcgccgtgaacgcctccggcgtgaccggaaacgtttatctggaattctccgcggaaaacgcctccttcggcaccttcaccagcaataacgcctcctccgtggtcggatcctatgctacggatatcaaggggaacgtggacatcttgattaactccggctccttttccagccaaatcatgggcggcatttacgcgaatgccaacaacggcacaaccaccatcgggggagccacgcacgtttacgtcaacggaggctccattaacggagacgtgatggggggaggcctgacaggctgcatttccggcggttccaacgccaccgtcacgggcggagtcatcgccggctccgtttacggcgcaggcaagggaggctccatccgggagggaagcgcggtacgcgttacagggggcaccatcaagggggatgtgtatgcgggaggctccggcggcaccgttcagggaaatacgtccgtcaccgtggccggaaactccgccacgcttcacaacgggaagtcctggagcagtatctccgggggcggttccggcggcgccgtcaacggcagctccatcgtgcgcatccaggatctttcctccgggacggcggcctacggttttgacaagtatgccggaaccatcagcggcggcacgaatgtgagcggcggcagaagcctggtgctggaccatgtgaccgtggagcatttccaggcttccctgagcgacttcacccatgtttccgccgtcaaccagacccgcaccacgctggattccctgggaggagcgctcaccgtgaccattgaagccggaagcggactcgtcctgaacggagtttcagacatgaccacgctcattcttggggaacacgcctccctgactcttcagggacttaccgcggacaaggtcatcgtggacattacgggcaccagccactacacgctttccctgacggagattcccgccagtctggacaacatcaaattcctgaacaacggcgtcctgtacgatgcggccatgtccacggacccccaggccaattccgccatggtcttcgcccaggcgccggagccggggagcgcttccctgggtctggccggactggccgccctgctgtggcgcaggcgcagaaaaatcttccattaacggccctttgttttcttcaggccctgatggacgaaagaagcccccgcaggcgtatgccgcgggggcttcccatggaaggaaacgaaagaggaggcgtattgctacgcccgccgggcgcttcatggaagcgcaaggcttcaggctcccctgtttttaaacagctccagcgcaagctgggaccaggtttccagcttctcaaacatctccccggacagttcctccggggccacgaaacggagattggccagcgcggcttcattcgcgcgcacccggtccgtatccagctcaaacagatggacgatgcccagatgcacggctcccacgtcattggaatcgtcattgatcacgcctagcacccgctgggtgcagctcccgtcaataaccagttcctcgcggatttcacgctccaccccggccagataggtggaaacatcgtcatggccggactggcggtccaccggattgatatggcctccgatgccgatggagcccttgtcatgcagccgggcctcaccgccggagccgccgcgcgtgtaatgcaggatgcggccctggtggcagaaaatggcataggcgatgatctgcttgtgggaggggtcgttttccgccgcctcccggtccatgaaggaggagacccccggcttcatgaacgcattcagataatgatccccgccttcccggtgtccctggaaataacccgcttcttcaaacgtggcgcggggaaccaccagaacctgttctccattgtaacgtgacatggagacaccctacccgttttgaccccgcgctcaacaaaaaaggcgcggaaacggcaaatttgagccccttccggaacggccccgaacggctttccgcctcaggaaatatcccggacttccacgccgtggttccggaaccggcgcatgatgctttccaattgatccgtgctcatgagcttgagcggcagccacagcaccagcttcttgccgaacaggaacagcagggcgtggcgcgtcttgcacagggtagtgaagcggtcgtaggggatattcatgggctcgacgtccttgctggagaaagtcatgtaatcctcatggaagacgtaatccttttcctgatggtacatgggcaccttcttgttcgcggccagggcggccttcgccagaaagggaacatagaaccaggacaggatgatcgccatcagcgccccggccagggacagccacgcgaatatgggcagcgggcgcagggagaaggagtacagcgtcatcagcacaaaaaaggcggtgatggccagatccagcggtttcttccacttggggcgcaccgtattgtaccacatcaccagcacctgggtcgccaggcggtcggaaggcacgggcttgacgagtttgatgacctctgaatcctgcatcatggcggcagggtagcttcattcccgcggaagagaaagcctaaaaacaggccgttccgccgcgtttgtgtcaaaaaagccgcgccggaaaggcgcaggggtcctttttgtccgccccaattcacagggaaagcctccttccccgtacgcaggccagaatttccttgataatcatggttcccttcatagaattaaaagccaaaagcctttagcagacccggtggcagacaatcttcaaattcacgtacgcacgttccagcccgcaaccactcaggaacaggctctggaaaccttgacggattccatggcggaagtccttgacgaacgtcagctaaggcacatcaagaatgcggtccttctgcgcgaggaaacgcaaaccacctatctggaccacggcctggccgtcccccacgggcgcaccagcgcgctggactccatgcaagtcaccgtaggcatcagtccggaaggcgtcctctggccggatgacgcacgcaatgcccacctcatcgtgatgctgggcgttcccaccgccatggtgaccggctacctgaccaccatgcagaagttgctgcggtggcataaaaacgctcccctgggccccaacggggaatggacgggagacgaagccagcctgctggcgtcccttcaacacgccctgcaatgacggacaagaagaaccagcctgcggcgaagacgcgcatttcatggtcatggctgcgcatggcgctgagcctgcgtgaaaaggtcaagctgggtgacaagcaagtcatcttcatctgggcagtcgtcgtcggcgcgctgggcgccctgacggcccttgtttttgaaatgggggtggaactggtgcaggacgtcctgacgggacgcaccagctacaagcaaatccaggtctttcaggaaatggccagccaggactgggcctggtgcatcttcgttccggcggcgggcggcctgctggccggcctcacccttctcttcacccaccgctttgtcccggccaaggccacggaatacatggaagccgtggcgctgggcaacggctatgtgccgcccaagcccagcctgctgcgctccctgtccgccgttttctccgtaggttccggcgcctccatcggccgtgaaggcccgctggtgcaggccgccgccgtggtggggtccgccctgggccgcttcttccatctctccgccccgcgcctgcgcctggtggttgcctgcgccgccgcctccggcatgtcctccgccttccatacgcccctggccggcggcctgttcgtgagtgaaatcgtgctgggcgcgctgaccattgactttctcgcccccctgctggtggcgagctgcgccggatacttcaccatgggcctgttccatgaaccggcccccatctaccagctccagcaggaagtgtccctgacgggcaaccagcatgtgctctggtgcgttctgctgggcgcgctggcctccctggtcgccagcttctggctcctgatcctcaaaaaatcgcgccagtacctgaacgggaagcgccagtggcttcccgtgcgcctgatggccgcagggatgctggtgggcgtcatcgccatcttttacccggaaatcgtggggaacggcaaaaacatcatcacctccctcattcattatgaatttgacgccacgagggccggcatcctgctattcctgaaaatcttcaccgtcgccatcgtcttcggcgtgggtacggtggggggcgccctgacgcccagcctgaccatcgggagcgtctgcggcttcctgttcagcgcggcgctcacccagctcggagttccgggggaccatgccatcgcctattccctggtgggcatggccgccttcttcaccacagcggccaacgcccccatcacctccctggtgctggtagtggaattcaccatggccgggcacatgatgttccccctgatcatcggcgttctggtctcctacggcatggcgaggctcaccaaggcccagtccatgtaccatgattccctggccttcggacccagaagcacctttgacaagcccctggcccaggtgcagctccaggacgtggcgcgcaaggacccgcccgtggtccacccgctggataaattcggcacgattgcctccatgctcatcaagaacccggcgcagcccatcttcgtcacctccccggcgggcaaatacctgggcagcgtggtagcggaagatgtggcggccttcgcccgcaacaaggaactggcccaggccgtcctggccatggacgtgctgcgcagcgacatgcccacgcttcccgcggacatgcaccttccggaagctctgggcatcttctcgcgcccccactgctcggaatccctggcgctggtgaacccgaacaacgatctgctgctgggagtggtcaacaagacggacctttacctggtgctctccgaaatcatgcggcgggaaaagctgcaataggagaggcgttttccgggccgcgccctggttccgggaagacccgcgggaagcgcaccaggcccctggggctcttaaaaaatacacggacaaaggcaaccctctccgttaattcaaaggaagccttctcttttctcttcgtccgctggctccctttttcttttccgtcgccgcattggcatgcggcgctcccgacggaattcagggaataaaacaccgcggccttctccggcgcctcattcctccgcagacctttcatgaaaaaagacggggaaacgccggcatggctgcgccgctgccatccgggcaaagggcttcccggtctttcccagcagcatcctgtccggcgttcaccggaggcgggctctccctttccgaaaacacggacccgcttaaaaacgcattttttccaccctcttttttcgcaataggggtcaggttaaaaataacaacaaacttgcatttttgacctcatccggtacgcttccggcatgagccgtaccctgagaatagaataccctggagcggtctatcacgtgcagagcgagggcaaccgcggagacgccatttacctggacgacgaagacagggaaacctttctgcgcactttccaggaggcggcccgcagaagcggctggaccgtgtacgcctatgccctgatggccaaccactaccacattctcttccagaccgcgcgcgcgaacctggtggacggcatgaaatggctccagactgcctacacccagcgtttcaacgcgcgccaccgcatgcggggccacctgtttgcgggcaggtaccacgccatggtggtggaagcggaaaacgcccactatttttccaccatcatcgactatatccatctgaatccggcgcggtccggcctggcacgccgccacacgttcctttccggctgcaaatggaccagcctgcccgcatggctggacgcgcccgccaaaaggcccaagtggattcatccggagcgcggcctcgtctgctttggctgcgacgacacggacgacggccgccagaagtacctcaaccacctgatgggccgctttgaagcggaacgcatggacgaacgctccctgctccccgccggccatgtgggccccggcaccgtccagcggggctggtgctacggctccagcgcctttcgcgccaggctggtgggcgaacttccccggctggcgcgcagaaagcccgtcacgacgggcatgcgcgcctcggaaataggggaataccaggcggagatcattgtgaaaaacggcctgaaggcgttcgggctctcggaggaggacttgctcgtcacgccctacagccatccgtccaagctcatcattgccctggccatccggcaaagcacgctggttccgtacgcctggatcagcaaccgcctgcacatgggcattcccaaatccatgggcaccctgctccaccgggccaagaagatggcggaaacggacttgaagacgcgggcatggatcgaacgcctgaccgcctgatttttccctgcgggagcgtccaaaagaagcttctcccggcccgtcacatggaaaaatccggagggagggaaccatgccgtccctccggacatcaccccgtgacaggataaagaacgccggagcgaacgatgttatgccctgcgccggcgcaccagcatagcggccaggccaagcaatcccatggatgccgcagccggttccggaacaactgaaaacgccatggccgcaaccccggctttctgccctccgatacggaaatcaagagtatccgccgtcgcctcccctgtccatttgaccagggtcagcttgccgttggcgaaggaaggcgtggacgaaaaaccggtcccgtccgttgccgcgtattcaaaggtgccggtgcccccggtcacggtagtggcccccggagcggccacggtactggaaatgaacatgtaaaatgtcaccgtgtctcccaccgtcagcccccccaattgaatggaggatgtggtggagcctccggcgccgggagccatgtaggaagacagcgcaccgtaatcaaaagaaccgagggtattgaccagatccgtcatcgccgccttgttctggtaataggcgtaataggcagggtcaccctccccgggagttacggcggaaagctccgtgttaaagaaattcccggcgcttttaacgattttaagcgtgtagggagtatcgcttccggaagcgtccgccaaggggagaacagccgcagcattggaagtgtactggttcatgccgtcccttcctgggccatccctgtacacgtccacaaaaacggaagccgcttgggcgatggaaaaagcccctccggaaataagcaggaataatgttttcttcatggtttttgactattctgacaatggaggccagtttaaggattttgaatccggacaatcacgcaagacgcagaaaaccgcctgtttataaaaaatgtcccgtccattcatcacaggcgaattccgtctgtggcacagcggcgtttcctgataactttttctttttcattcattccttattgacaccggattcaaaatccgcctccggggaaaaagaagccggattaccaggtatatcctccggtttccatcccccggaatatgccgtatgaacgaatatccatcgtccataggggtcagtttacaaattacaacatgaaaagatattttctattttcctgctgaccctttacactttccggggaaaaaaatgattgccagtccgcgccgcggaatgataaacgaaaagcgcgtgcgaaaaaccgcgcgtgaagcgtcaacccaaatacaacaacagagaagatggcacagacatattcccagcgcgtgctcgacttggtgaaaaccaggaacagccacgaaaaagaattcatccaggccgttcaggaagtgctcaacacgattgagccggttctggccgcgaattccaagtatgaagaccacgcgattctggaacggatcgtggaaccggaaagaaccatcctgttccgcgtgccgtggatcgacgaccgggggaaggttcaggtgaaccgcgggtaccgtgtggaattcaacagcgccatcgggccgtacaagggcggcctccgcttccaccccagcgtgaacctcggcattctgaagttcctgggctttgaacaggttttcaagaactccctcaccaccctgcccatgggcggcggcaagggaggctccgacttcgaccccaagggcaagagcgataatgaagtgatgcgcttctgccagagcttcatgacggaactccagcgccacatcggcgcggatacggacgttcccgccggggacatcggcgtgggcggccgcgagatcggctacctcttcggccagtacaagagaatccgcaatgaattcaccggcgttctcaccggcaagagcctgaactggggcggttccctcatccgtccggaagccaccggctacggctgcgtgtacttcgcccagaacatgctcgccacccgcaacgacgatttgcagggcaaggtttgcctggtgtccggctccggcaacgtggcccagtacacggtggaaaaactcaatgaactgggcgcgaagcccgtcacgatgtccgactccaacggctacatttacgatccggacggcatttccccggaaaaactggcctgggtcatggaactcaagaacaatcgccgcggccgcattgcggaatacgtgaagcagttcccgaaggcgcagtactttgaaggccagcgtccctggagcgttccgtgcgactgcgccttcccctccgccacgcagaacgaaatcaacggagaagacgcccgcaccctcatcaagaacggctgtaccctggtggcggaaggcgccaacatgcccacggacctggaaggcattgaaacctacctggccgccaaaatcctgtacggcccggccaaggccgccaacgccggcggcgtggccacctccggtctggaaatgtcccagaacagccagcgcctctcctggacgcgggaggaagtggaccacaagctgaagagcatcatggccaacatccacgcgaacgccctggcccacgcccaggaatactcttccgacaaatccttcaccaactacgtcaccggcgccaacattgccggcttcgtgaaggtggcggattccatgatcgaccagggagtggtttgagtcccggttgtgacacacttgctgccaacgtaaaacacaacagaagcgccgggttcgcccggcgcttttcttttattcctttcaaggggcctctccggcccggaaatagctttaaatgctgcgcccggcagaacgagcatgaacattccacagaaggatttctctgcctgaaaaactactcccgattccaaaaggaacgttcaccgggaattcacggcaacaaatcccctggtccggaccgggagacagaatggaaaaacggaaccggcatttcaccggacaacggccacggatgtattttccccatcccggttgcgaacccgtttccatcaataaaacggccggcgcaattcttcccggttcaaatcgtcaaaaaaccggagcattactccttcagcagacggcagacggcctgggccgcgtgttccgccgctccgccctgccccagcttgtcggaggcctgcttcatttccgccagcagggcatccctgttttccggaaccagcaggcgttctatttcctcaatcaccttgtccggcgtaaaatcaaactggatcagctccttgactacgggcttctgcgccagaatgttcaccatgccgatgaagcgtattttaataagcatgcgcgccatccagtacgtcagcaggggaaccttgtacaccagcatgtacggaagccggtgcaaggcggcctccatcgtggcggtgccggaagccaccacgcccacggtggcgcggtccatcagttcatgatagccccccactgtaatgtggaacagctccggcggcatgccggccttctgcgccatgccgcgcattctttctgcaagcgcctccgtggaagctgcggtttcaaaagacagctccggccgttccccggaaaggcggcggaccacctctatcaacaccgggaaatgcctgtcaatctcacggttccggctgccgggaaagagaccaaccagggacgcctcccggacgtcatccttccggatggaagcaatctcgtccaccagggggtgccctacgaactccgttttcagcccggcttcctggaacaagggagcctcaaaggggaagatgcacatcatcaggtccagcatgcgcaccatcttgggaatgcggccgcggtgccatgcccatacctgcggggagataaaataaatgattttggtatgcgggcagcacttgcggaccttctccgccagacgcaggttgaatcccgggtagtcgatcagaatgaggcagtccggctggtcctgccgtatccgctccagaatggagagaaaacgcttcctgaaccacccgtacttcttgagcacctccaccacgccgatgacggcggcttcatccgcccaatcctccacgccggggcataacgcatgcatgccgtggccgcccagccccctgacctccatgccgggcatcaggcgcagcagattcttcaacagcagggctccgtgaatgtccccgctcttctcgcctgctatcatataaagcttcatcactctctgcaacggcgcgcgccgtatgccttccaaccttaccagccccttttccaaggtgcaataaaagacttttctttcaaggattttaatgcaagatacgcgccgttatgcatgagttgatctcactttggatgtcctgggtgcaggactggggatatgcgggcgtcatcgtcctgatggccatggaaagctccattttccccgtccccagtgaggtagtcatcccgcctgcggccattctgtccacccaggatggagcatccatgagcttctggggggtggtggttgccggaacgttcggctcctggctgggatccgccattacctacgccgtagcccgtatcgtggggcgcccggtcatcatgcgctggggcaaattctttttcatgccgcccaacaaggtggaaaaggcggaagtcttcctccagcggtatgaggtgtcaggcgttttcttcgcccgccttctgcccgtcatccgccacctgatctccattcccgcgggcattgtccgcatgggcttcggcgtcttttccctggtcaccgtgctcggcgcgtttgtctggtgcacggtgctcgcctggtacggccaccgcatcggggaacggcatccggaactgctcaagtccccggaggagctgatttccaccgtcaagagcgaaagccttccccttattctggccgtgctggtgctggccgtctgctacatcctcatgctgcgcctgacggaccgcaaaaaaccggaagacgccgcagcggacgctcccgctgaaaaggagtagtaaaagaaaacctttttcccatgaacggttccaaggaagaccgggcagcccaggcgctggattatttccaccagggatacaactgttcccagtccgtctttgcggcttttgcagacgtctgcggcctgacggaggaaacggccctgaagctctcctcccccctgggagcgggcatcggacgcatgcgggaggtatgcggcgctttttgcggactgagcatgctggcggggagcctgtatggaaacagctctccggaaaccggagaaaaggaaaaaatcttttccctggtccaatcactggccgcctccttcaagcaggaattcggcacgctttactgccgggaactgctgggattgtctccggaacgcctggcggcggagacggcgcgccccggagaaagaaccgccgcctactacgcctcccgcccctgtgaacgctgcattgccttctgcgcccgccacggggccgagctggaagcaaaagcccggcatcattaaaatgcccggtcacccatggagggaaaccgggcattttaatcagacggaagattccgtcaatgagcggcctgggaactgcatttgccgtccgggcaggacgccttcaatttgtcgatcttttcattggtttcacccatcccttcatcgtagaagccctgttcatccggggccagcacttgaaggaggcggaggaattcgcccgcgtgttccttttcttcattggaaatgtccaaaaggacttcctgcgcaagcttgttatcgatggattccgcaagctgggtataaagctggatggcctcatattccgcagcaatcatgaaccggatggcccttaccaattcgtcatgggtaagcatccggtcttctttttgtccactaaatgcatttgtaaattcaggcatgcaggtatgactcaaatcaccactaatgtattcaaaatgtttttgtcatatatttttcgcgacattctttgaactttttccattgaaaacggtctaaggaatccagcatcgcattccggcttttttccataggaggaaacggcagtttttccctcctcaattttcccgctgcgggactttccccactgtcggcatgaaatgaaagaggcgagccgggacacatgcgcggcatgagaaaacgcccggattcttcgtggaaaaaaccgggcgtcttgcagtggcggctggaaagccctttaatgggcggcttgggaactgcatttgccgtccgggcaggacgccttcaatttgtcgatcttttcattggtttcacccatcccttcatcgtagaagccctgttcgtccggggccagcacttgaagaaggcggaggaattcgcccgcgtgttccttttcttcattggaaatatcccaaagaacttcctgggccaatttgtggtcaatggatgcggcaagctgggtataaatctgaatagattcatattccgcagcaatcatgaaccggatggcccttaccaattcgtcatgggtaagcatccggccttccttcaatccactaaatgcgtttgtaaattcaggcatgcaggtaggaccggatgggcaaatccttcattcaatatgcgtttgtcataatttcatggagcttcttttgaacttgcgccatcaaaaacagtgtaggggaaatttctcatctttcttcccaaaacacggcaggagcgacggttgttctgccgccgctcctgctgaaaacgttccgatccggaacaaatacgttacttggcctccgcagtcttgggcgcgtacttcttgaaaaattcaacgtactggacaggagtctggccgggaatataacccgtgcggcccagttccttgccctccgcgtccaccacgaccatggccggaacgccggtgattctatacgtcttggcttccttggacttgctgaaatcagaactgccgaactcgaacttgacgccgatagccacgccgtccatgccctgcttgaattccttcttggaaaggatttccttctccagcttaatgcagtagccgcaccaggacgttcccgtaaaaagaaggacgatgggaaggccggtttcctccgcctgcttctgggcgctcttcaggctcttgccccagcggaatttcaccttcgccgccttggcggccttggcggcggcttccttgtccgcgggagtgctctgggccatggaaacgccggaaacgctgaatcccaagacggcgcacaacgcaaaaataaaatgtctgttcatcatacttgtgaaatgttcttcccaaattagcaaaaatacaccgcataggaagaaaaatcagcgtcttcctcccggcaggaatgcttcctccccctttcacaaaatggaccgctttcaaaaaaagtattgctctttccgccttaatcgggtaataatccgcccgcacttccaaaacgcgcggttagctcagtggtagagcaacaccttgacatggtggaggtcgtaggttcaaatcctataccgcgtaccatcttcttaaaatcccgtccctttccggacgggattttttattgcccctccctgatgaatgggatgatgcggtctggcgcctgttgaaaaatgccagcatcaacggacggtttgtgtaaaaattgatggaagctgcctgaataaaaataagtgtggaaatactatccatacctacttacggtaaaaggtataagtcatatcttcctccctcctccatccatacggaaaaaaatatttttccaactttttttgaacgcaagccctgtttcgggacgctaaaggtatgaaggcagatgaaggccccagcccttgaccctccttccctgatgaaataatgaccattaaaagcccggcggaagaattctcccgccgggcttgcttttcaaccaattccgttgctgaaacggcccggacggctaccgggaagtcaaacggtcgtataactcattggcgtatctgtgattgggatggttcacattcatatacgcctcataaagcggatgggagggatccgactccatgcgcatggcttcctctgccggggagggcgttgcggcccccgaatgatgaagaggagcttcatcaagcaggcgtgaggcctggtacagcaggcggatgacgtccggattggaccctagccccggattgtcaagcagggcatccacatccactcccgtctcggacgcaagccgctggagtgcggcggtagccctgcccatgttgcgctcataattggcgccccattcctgctgcagggactgttccgcctgcgtttccatctccatccgggaatccgccatctgttcccgggcctcctcatatgcctgggccatcgtttcctggagagcgttcatggcttccggcggtacgccgtaacggtaggccgtgcgggccatgcgttctgcgagccctgcattccactcgctttccggcgtggactccggacgttccaggcggtaatcttcctccgattccggcaagccggccagacggcggaaccgagccatctgctcctcattctccacgccgggataatgccgcaggcgctccagctccgcataactcttcgccagcgcttccggcgtcttgaacttggaaagggacttctccatccccttcaactcatcaaaccgggcataccaatccggaacaaaaccgccgtcctcccccaaaagggaaggaagaggcacggcttgagccgcggcttctgtcaacgcttccgcctccgggaaaactgctccggaaaaatccgcctccccggagggagcggccatattattatcaatggaatcaatcattcttttcttctgctgtggattctttaatggctaactgaacttgacggcggatgtacaggaaaacctccctgtaggcatcgcgcctcatggcgtccagggggtcataactccccgggctgccttgaaaaacgggcaaatcagtctggaagcgggcttccagaaaggacagcgcctcccgcccgtccggagtgtcaaacacccggaaaagctggcgccttctgagactggcctcccggacggaggcctcctgctgcaatgtcgtatcctggttcattcctgaatcgtggttaactggtcaagcaagggattgagggaagcgtacggctcctcttccgccggagcctgtgcggccccctgctggcggtccgcccgttccttccgcatggcctggacatcggcccagggcctcagcatgctctccggagcgccgtccacacgggtggacaggcggaagcaatggtcccagtccacatgatccgccaaatccggagcggcctgcatcatcatattcaggcgctgaaggctgcggtccatcccctcgctctgcaagcgcctgagcaccagcgcaatctttgactggtacaccaccctgggctctccgacggcaatggagccgtccctcccctcccgcagaacggcgcggggaggcctgggaaacttgcccatgcggaacagcagggagaaaatgcgcgtcatggtggaatacagatcactcacaaacagcgtgaaggacggggaaaacatcagcacgcgctcgttctcccgggccatcacctccgtggcggtcatgctgccgcggtggccgctccaaagctccagcatgggcaggtaataggcgcgccggatggcgtcctgcttctgcgccagacggtccatcccgacgtcatacctgccctgcgtggcccactcccgcggaaggtggagggaggcggcctccggggtaatgacggttctgccgccggcccgcaggtccacctccccaatctggttggcgagctccagaatgcgtgggaaggcggccacctcccccagcgtgtccagaatgcggttcaggaactgaacctgctggatggcgggaaacaccagcctgccgggcgcgaggccgtacggaccgctgccccacttcaaaaaccgggttaccaggtagggaaactccatatatcccccctcctccacgatcacctggtcgtctagggacagatacacgctttcaaacggcatgtgggcggcctgctccctgcggcggctgcggcgggtgcgcggacgcaccacatgcagaaacctcagggacatggcgtacggattgccgccgcgttccaacacctcccgcgccctgggccccagggccttcatgccgaacatggaacgcgcctggtgggcggtataggtaaactccctgacgtaggtatccacccggccttccgcattctccgcacaggcgaactgaccgcacggaatattggtgaacagcagccttccgtccgaggaagttcccgtaaacaaactgccggtccccaaagccacgcggtccagaaaacactcatggatctccgtatagaaattggaaacggacagctccttcagggcaatctccgaacactgattgtaccaggcctccgcctcgtcccctccccggtcgtccggagccgaccacttgaaccacacgtcatggctgggcgtaatgtaggacatatggccgctggccagcttctggcacgcctccacggcagtggtatccgtcatgcggtccatggcgtccctggtggggagggaaacctccccttcccggttcaggcggcggggcagcacgtaatccctcaggcggtcccaccacgtctcccacggcgcgcgctgggcggccagggacttgtacacggaattcagctccgcaactctctcttccatggcggtgcctatcccagggttttcctaagcagggtccggggattgacctctccctgcccggcggaagaattgcggcgcgccagaatggtggaaatcatcccctgcctctgccgctcccgggcctgataatcttctcccacttcctctcccacgctctccgccttgaccgggatggtctgctccggagctggagtggaaggagtggacggtttcatgaatcccataatctcttttactttctatgcatggtttatactgatggccccttccgcctgccgcacggacgatccatgcggcgggagtgttcgctccccgcggaggaaaagggcggtctcctcacctgcccggaattgcccgggaaggtgcatgcatttatcaaatagatgaattggaggaaaatgcatccggggaaaaaccgggcgcatacgtgccaccggtggcatcaaagagggtgttcccaaacgtgatgcattccgcatccgtttccgccaaacatgtggcgttatgatcaatgaatccttacttcagccggacactccctccgcgctggacatctgcaacgcggcgctctccaaaataggggaggctccgctggacgcgctgattgccaatgaatccacggcatcccgtctctgcgttcttcattaccacccggcacggagggaaaccctctgcatggcgcgctggaccttcgccaccacgcaaaccacgctggactccgtctccgcccaggcgcccaactccctgacaccctatcaattcaccctgcctgcggactgcctgcgcgtgctggatgtggaatgcacggaatggaaaatgcagggaaggcgcatccacgcctcccgcgcgccgctgcccatgagctacatagccgacattgaagacgccgaacaattcgatcccctcttcatggacgcgctggctacccgcctggcagaaaagcttgccatgcccctgacgggcaaccagagccttcgccagaatcttcaccaggaattccataaaatcattctcccgcaggcggcaaccgtcaatgcggtgcagagcttctccaacgactcccaccccctgctggacctgctgaggaaaatcaagtcgcccgcctgcccggaggaatgtgaataacaggagaataacaaggcagcaacataacaacaacttgtgaatacaagctcatgaaagccctggacttcatacagatattcgcctccaacgtccgcaggctggacttccgcctcagcagcgcccaggtcatcctggccgtcattgccggatacaggcgccacagtaccattacggaagccacgcgcttgcatcccaataccgttaccaacatcctgcaggacctcattgcacagggatacatcaaccgcttcggggacagccgcccttacgtctaccgccccaccgcggatggggaacagcttgcaggaaacctgctggataaaaacaccctccccagcccatgaaagagcccctgctcagcacggaagaaaaacgccgctggctggcccgcgtcttccgggatacggatggagaatactcccaggcggacaaattcaaggcgctggtggaagataccaaactggcggccctccagcaggaagaggaggaattcaaacgccagcgggaagcgggcgccgcaccgcaggaccccattctgaccctgctccagtccctccctcccgcagaactcgatctgaaccggcagcccccggctgaaaaataaacaacaaaacccgaaaaaaagctctccagaccaaacaagcctggagagcttttcatttttaggaagagttacgcactccttgcggatgatcgttatcagtgaagggtggaaaggggtgaatttggggtgaataagggtgaacgctaggaaaatcaaggggtgcaagcgtcgggtgatcagggaaagacagtgtggaaaaaatcggcgtcaggaatgcaaattatcaagcatcgtggaaaataatcatgataggattcccgcatgtgtacatctacatattgcataccattgtacggctccattaccgttatctctccagaagatcggaggaaaaaggcccctcaaatttaccatctccatgataccgctgtcgtgttgatgtgggcaactcgtgaaggggccaaaacaacatgctgggtgagggatgtactcgacaacgtgtggattgtgatcaggagagaggaagatgatgattgaaatgaaaaaggccgccaggaacaacctggcggcctgaattgtataagagcgtcatggtctatcaatggtcggaccatgatcagtcctactgcacctcctcctgtgggacgatacgccatccagatcggacctcgttactgccgatgtcaataacccagtcctgccaaatatgatcgactagcacccccttggatgggctgaatactgccataatgcggtatccatccgattgagataagcaggcagactcaatcatggctccctccttggcagctctaagagcctccggccaggtgagcggatagccaggattactcatgattgcacctcccctggttgtacttgcgggcggtcatatcccaggtagcctccagagctgagcggtggcgctcaagagggacagccccgacatgatcggccagcttgccgggcggcatcgtgcgcggatcagcatgcggttcgtaggtctcttggccggtctcggaggccagtttgcgggcatccgcccggccccggttgatgatggtgtacatcaggtgctggacatgctccacggcagcatgatctcgcagggtattgtacactgtccgacctgtgcaggatagatgcagttggtcgcgcacaatagccgccagatagtccggcgctgtctcatagcgctgcatggcatcgcgcaggttgtggatgaccttgcccatctccgaccaggtacggtccttaatgggagcatcgcccaggtaggctgccagcctattatagataggcacgtagtgctcttgacaacactgggtcagcgactcggtgatcccggtggcgtaccacacctcctgatgtctccactccgccaagggaggaagggggcagccctgggactggatgcgcttgtaagctttgccggccatgatggacagcacggtgatctgtcgcttggtgagtggcttattgctcatgatcggattgttgcttgggatgttgtaaatcattgaccaactggtcccgctgtgcgggagtcaggtggatcagcgtggcggtgcttgcaccgcgtactgacccggttgtaacagtcaggacgacatggctatcaatgtagactacctcaatctcggtcatcgctcttggtgctcctctctacaaaaaatgtctctacctgctcaattttaagccccagcttggcgagcttgtgaggcttgacatgctggcggatcgcatccttgtcaggagtcaccttggtgaccaggtacgccttgcggcgtgtagtcttgagcagggcgacaatcttgtcccaggtccagcccttggcgggcttgagggagggctgccccaggcggtagccgtaggtggtcaaggctgtcgtcccggacttgcggcccttggggaataactcctcacgacgaggagaggcccattgctcggccatcttgacgagactgttaatctccgtggtcagatcgctgataccggggtcatgatccgtgagaacctgctgcaaggcggtctccttggccgcctgcaaggtgtccagctcgacgcccttgcgagcgatgtcgtccagggtcttgatgaaatcgacccggtccttgatcactttctgatccgtggccttagtcgttgtgcgtgtcttgcccattgtggtctgtgttttgaggttgggagttgttacattggcactgccctatcagggcgtaagcgcccacactaggagcaccgtctagagtaagatcggcaatgggcacgacacagagtcggccgtaccctttgaatcctctccgtaccacggccttaccctctgacaatatccgctcaataaccccatcataaccagagactctacacgatatcctgatccggtcggcggacttggtcgttgtctgagtggtccggttgacgtagaccacatcaccgaccttataggttgacggatcgacgggcctgagcttgccgcaatgagggcacttgtatttattgttgtacattgttatttgcatgtctcttgttaagttgctttcttttcttggtcagcatgtccacgacatgctgccaggtgaggtctggcgtggtgctgagccactccaagaacagctctccatctacagggatgtagcgctcaccgagctgctccaggcggatggcgatcatgcccggccagcgtggatcgtagacctcccagtggtagcaagcatccgggaatcggttgagttgaaggccaatgagaaaggccagagtattgggatcgtaggccataggatcaggcatgacggctggccctcctctccatatcggcaaaccgggggagaaaacacctctccagcttgcctgagtagcggttaatatgagcgttgatacccgtgacatcgtgcattagattaaaatcatcggcctgctccatctcggaaagcctcagagggcatccgttacagtggcatgccatcaggtccatcatgatatccacctcatcgagctctgtgttaccgtacttgcgatagagagcgatggcccgattggcgatgcgctcaatgatctcactctcctcagaggtagctgtaaataagtctttcattggtttccctcctggttggtcatcgcctctttcagagtgatcacatccttgagtaaccgtcccagtacggtgtacgcgttgccaagatgttgttgaaggtctcccaagtcgagcgcatcagtggtgccaaccggcccccataacttaacggccttgacgatggcatcagccagtttcagcatgtcgccgccaatccgtatggcggcgagcgtttccgatggtattgcgatggtgcggacggcaccttttttcttgtcgttgtctttttgcatagtggtgtgggttatgattcttgatcatcatgcagggcgatcaggcggttaagcttgcccagcatggcttcccgttggtctgcggggatgttcacgggccagtcctggcccgtgcggatgatattctttagtttgttcctttcttcccaatccaccacgatgcgggcgcatttgctgtctgcctgcatggtggcgggggtgatgtaggtgcggatgtccagcgagccgttggcataccggatcagggcaatatataaaggagcgggcatggtcaggaggcagtggccagtttttccagttgcttgtgaacggctacaaaatagccccacgtaaaattccttgccggccttgcgggcggtcgtggctccggaacgcatgcgcttggtataacgtcccaggccgtactgcttgaccattttctgcacgattttgagcgtggccgggtcagggtccggcaagccgaacgcctgccagacgcgctgctggtcggcataggtgatgttcttgggcaagtagatattgatgccgcgcaggatggtctggcttaacacaccttcccagctcgcaggcatcccatgccatttcacttgcccgtttttggactggccggaaagggtcttcccccatacgtccgtacctaccagagccatgccgcaatgcgtttcatcatagatttcccgcaaggtttctatggttttgaggccccgcgctccggtcatgcacacttggtgcacttcatcgaaaatcaggagatgggccggagtaaccgtctgcttgatgcgatccaccatcttttcatagcgcaggttttgcccaaggtccaattcacgggcaatcaggttcacgacacgcaaggcggagggggacgtaggtatgcgcaccagcaccacacggctggtgtcgcaaccggcttgacggtcagcaatatccttgcggcgtttgtattcttcgcaggcccaggttttgccaatttgcgggttccccaccaagctgacaatctcctggtactccacggagtattcaaaagcctggctgattttgcggaatatgtccgtatcaacaaatgggatgcccgcaacccacgtcttgttgttgtacctgcgccggaagttggcaatgctgttcactacctggtccggagcggcttcacggctctcataaaagagtttggaaagcgtggagggggaataccccacagtctcggcggtttgcttgagcgtccatttttcctgtttggccgtagccaccagccaggaaagcaagtccttggtccgtggatcgtagccggatgccgccaatgatgcggcgtagttgtcccagagggattcggttgtttctattgcgtccatattgttattggtttggttgttgtttgaaaaaagagctttagccgggaatcatgtcttccagggaaaggtgatattccgctcctgtttctggctccggttcgtcttccctgtcaggaaaggatggagcggcgaacacgtccacgccgggaacggagggagcgccgggcagcgcgtcccggtcgtccgggagggcgtcaggctgctggcgcgccaggcggagcacggcgtcattgtgttccttgagcgccgccacgctttccttggcgggggcattgcggaccttgtagtccatcatcaggtcagcgcggcgggaagcgatcaggcccatttgggatttcacggcgtcctcgtcgttccgggcggcggccacgctcaacggagccgctcccagaatgccgccgcgcttgtccagcacgatcaccgtgtccggcttgaacgggttgatcaccacgtcgtgcttgtcgtccgccagttcatggcggcgtccgtcgtcaaggtctgtataataggcatggtaaatgcgcggttccggggaaagcgtcttgtcctgcaaagtcatgtacccccgtttgacggtcagggtacgcaccttttccggccccagcagggtgacgtacaggtccagcggtatgcgccagagttgctttttgccctgctcccacacggcggctggagacaggcgcgtttcacgcaggcgggaaggatcggccagcaccagcgcgcggatggcctgccatgcctgcaattccgcctgtcccctggtgggatcgggcagtttgttttccggcgtccagacgccttccgccagcgcgtactcgcggatcatgtggccgcattcccgccagccttccagggcatgattggtgcggttgttgatgatggcgtacacgtcccggaggattaaagagaactggtaaaaatccaggaagggggatttgatcatgtcggcatactcgcccaggcgtggcagcgccttgcacagcttgtcttggtaggcaatcatgccgtcggtgctttccggctggcggcggtcgcgtccggattgtccaggcaatgcccccagcacgttatgaataaggctgtgcaggcattcgatcatggctttataacgggggtttcctgcgccgcgtccggcccagccgcccatcagggcgttgccggctccggtcataccgcccatgcccacgcgaatcacgccgcctgtgcggtcgtgaagcgccgcaatgtatttttctgaaaggttggccgtgccgtgctccatcatcaacaagcagccgtccggatggtagccggtggaataaaggatgttggccaagaagagcctgaacatttcattgtccagggctttccgctttttgggatcatccggcaacgtcacaaagggcatgtgcccccagtcaaaccggcagccggacgcaacgtcatgggcgccgaattccagcacgcgcacaggctttccggcaaaggtgacgtaatggtcatgccatacgtcgtcgaacatgtattgaccacccacgggcaggccaacgcgagaagtgcgcacataaggcagcacggcagcggcggcgcgcgatccccatttgccctgctgtttttcggctttggttcgggccagcactttgcggagattggccgctgagcatccgggcggcagcgtggctttggtccagtcttcgaaccccggaacttgttctctgccggaaatgatgcggtgctggatttccagaatgccctgctgctcggaacgttggtgtttgtccaggatcgccttgccccaggcgacgaaacggggagaatgcacccccgtgttggcggtgcgggatttgagcgtattaccgttcaccatggcacgccagttgccggggtcttcccgccaggcataatatctttttttggcaagccccttgctgcaccccatggccttggccagccgatcgataatgccacccgttccgcaaatcggcaggccggaaggcaaatcagaaagggccgccagccagcaataaacccggtcgcgggtaggcatatcaagtgccagccagtctggatcgtgggcaggtacgggtacagttttcatttttctgttgttttcagaaggttaattgtctagttttcggcatggagtatttggtgaatttcatagcggagcactggtttgaaatagttttgtcgataggcacggtatggttcggatacgtatttcaggaatggaggaaaaagagaaaggttcaactggaaagagaagctagagagttagccaatttacatgctaacttgaaaaaaggtgataatattcaaagagggatatacatcctgcaaaatacaatccaattggcggtgtcttgtgtttatgagacggtctggtgtgcagcgtggaccgttattttttttgtaattataagaacagaaaacacttttattatttacttagtggtacttaatattggactttgtggtgtaagattcttcctggctaagcgcgacttggtatctgcgggtaagaatgcgtttgtatctttctacaagaataaaattgaagaggaaaatcccgtaattaaggagaaggattaaggagacaaagtgatctttcaggaattctttcatgatgttataatgatgggatgttaaagctggagttatttcccgtggcggcgaacacatccgccacggggaggctgtccggattgctgggcctgtcctgggcggatttgcgggcggcctgtacttggtccaaggtggagcgcaggacgatttccagggcggccaggtcgtccttgtccagcaaggcgtggcggccaaagtcgcagaactcgctcaagtcctggcaaagtttgtttttggcgtaggtggccagcttccgggcttccgcgagttccgcttccgggtcgggttctttttccccggctgggcgtccggcgggattaccggattctttgaagccgtgagatttgggcgcactcactaccccaaaatcaaagtaggcttgccggaggctgtcggcgtcggatagcttgccgatctcttccagcgtgcgggcatctcggcgtccggactcaatcaacgctacatccaccgtgcccagctttttggcgcgcttgagcacttcccggtggagcttcatgtagtttctgcccgtcctagcatcaaaacggaaacatgtttccgttttgccgaataactttccccattccccgtgctgggctgccgctttcattctagccagcaacccgcccagcacaaccgctgtcatccagcgtttctgctccagggtttggatttgccccgtcaatcctgcaatctggccgtgcagtgcattggctcggacgattgcaatttcccaatcacggtttgtggttgtcacctctccttgaggtataatctgaatctcatatttcattgttaaatctcttatggtaagcaattttaagcttgcgcaaggctttcttttcatagtactgcacggactgcctaggcagtcctatgtaggaagctatttcctgctgggtgagttctcccctatgatcaattccgtaatgccgccgaaactcaggaatgctccaaagggcattccataacgcccattcatcggctgtcataggggcgtccatgtctacagcatcatcacttggctgcatggcgttacttggtgaggggtacaggcaacacggcggtgcgagcatccttgataccggagcggacttgttcggcctccgtatccaaacaatgaaccaccgcccaggctgccaaccagcccatcagggctatgacggctattgcaccagcaaattccataatatctcggatggtgatcattgcttgcttccttgcttcttgtcggtccgcagatcagttaattccttatccggtagggctagcaatgcttccacggttggtttgtggtttctatccccccgcacaacgcggcgcacatgactaggcgttttgttgatggcgcgtgcagcttgcgtaaaggtgtatcccttgacattgtatagccaatgcacggagatgttatcttgtgctgtatctgtaatcatgatagggtctctttatggccgccactgtgcggcctactttctcaaagtagtactacttctatgagcgatcaagacgaaaataatacttctggaaacttttctctacgacttttggaaatgatgaagcgtagaggtttgacccaaaaagacttagctattctaactaatttgtctcagggagctgtatcaaaatatttgcgcggtttggcattccctaagtctctagagctatataaaatatctaaggtattaggggttcccatggaatggttgatgggcggtgatgaacctatatgtgacaatattgatgattactggcaccaagaagttatcagattacaggcacaattggacatggccatcagcactttggaagggacacttcaatctttaaaatcgaaaagaagatgaaaaaaatacatataacatgtttagtaataattactattgcagctatatgtagctccatatttttggggatgcttgtactcaatcggaatgatgttgtcgtggactacgaatacaaagccgagcctatagatcgtattaacgatacatccttaaaaccgggtgatgacaactaccttaaacgcaactctttgcctaaacatctttttcaagatggttgggaacctatattttacttcactagtgaaactataggagggaaaacagaatataactgtgtatgccgtcgcccgaagtctacccgatagcatgacatagctgcaatcggctgaccgtgaatttcatgtagttattcaggcgtaataaatttattgtaaatttgttacactatgatgcaaatgttagatttgcgtctatattgatgtgcatgagcacattggaaatacgtaagaagacttcccatatgggaacgctgatcatacggccaatcagcaagaccttggcaaaagacctgatcatccggaaccattattcacataagtggaatactcccttcggcctttataacttcggactctttcaggaaggcgcccctgatgaatgtttaggggtggcggtttatggctggccaaagtgcccacgagccaagaattacatttctgatgtacccaatgggtggatgtgcgagcttaatcggatgtggatagacgattgtttagggaagaattccgagtctattctcatttccgcatctctcaaactattgcgtctatttgattctgccattgtagcagtgcagtcttttgctgatggccgcttggggtgcgggactatctataaggcggccaattttgattattatggctaccatatcactcgctttttccgtgataaaatgacgggagaaattttttcatgagcaaggattaagcaattccgcttgccgttcccgcttcctgcataagaacatagatttacttttgggccgtctggaatgttttgacacaaaaacttaccgctatatttacccatttcacaaatcctttgttttcacgggaacaaagaagaaaccataccccccttacgagaaagagaccaccccaggagttgaaaaaatcaagcctgatcatttagtgggtaggctcaccacagtgttgcagactttagctaagaaatatccccatcaatgaagaaagccgccaggaaaatctggcggcttttttattgtttgaaatgttggaacaaggccattgcccgtgtgttatactgtgtgcatggacgcaaatatcactcgctgggtgaaggggggaacttgtggagtgacagaggccgcacggatgcttggttacagccaagacactgtgcgccgcatgattgaggacggagaattgattggatggcgtgccaggcgtggaggtcgtaaattttttgttgtacaaggcgcaagtgaaagatgttgcatccagggcacaagcgcaggcggtacagtatgcacgggagatgcagcagatgacgcttgctctttagttttgccgcaaatgctgcaaatacagcttttacggcaaacgccgcttttgccgcaaatgccgcagcacaatccggaatgtgggctaaagtgcccacatgaacgacgcacaagatttcagcggaaccggcaatagcgatgccctgataaatagtggtactaatagagaacaagccctcgcgtcgggagacgccggggcaatcaccccccagcaaacggcaaagaagaatacgccctggtatttgagccggacattttggatcaacgctgccgccctggtctctttattggtgccgtcagtgagggattggcttgaatccaatccagtagaattacgaccgctcttggtgcggtcaacgtattgctccggtttgtgaccgtgggcaaatatcaatttgcggagccgaccggcggccaggatggaggtgctgacgagtcagcgccgagagcgtcccatacatccggcgccggcgactccgccctcttgctcgtgattggcatgtccctggtcatgatgtcctgggcgtgcagcagcacggacaagcagaccgccgccagcgtggctctcacggacggccaggtggtggtcatccgtggcggatcgtccttggtggttgaccgtgactctcacagcgttgcctggtcccagtccaccccggacgtggttgtggttcctcccgtggtacaggctacttccaagtaaccggactattaactgttaactgatcactattaactatgaaagtagcattagacatcgggcattgctccacgggcgaccagggcgcagtaagccgcgacggcctggccgagcatcctttctgggcgcagtacacgccagccatcaccaaggaactgcaaaagatggggcaccaggtgcgcgtcttccggcgcgaggattacagccgcagcatcaagaatgaatgcgtagccatcaacgcctggggcgccgatgttgccgtgagcctgcatcttaattctgccgattctccaacttgtaaaggtggccatgaggtggtgcattacgacggcagcaccaaaggtattgccctggccaaggcgattgatgcgcaatttgacctgatcacggaattggccgatcgcaacatccgaacgccttacgccaaccgtggcgacgtgtttttgcagggcaccatttgcccggcagtgattgtggaaggggcttttctctccgtagattccgatgtggaatttatccgcaaaaagggtgaggtactggcccaagccgttgctcatggcatccatgcttatgcggtgcaatgtggggcgtaattgcagaggcggcggccacgatggacgccggagcggtgggtcagatgctgggtgctctgatcggggctggaggcattggcgggatgggttacatggcaggcaagaccaagcaaatctccgtcaaaatggctgccgagtacgcgaccaaggaagacttggccaggattgaaaacgacattgccgaaatcgaacgattgcagcgggaatctgaaactaaagcccacggacgcattgacgaaatggccaaaacgctagccagtctggacggaaaaatggaactgctttgtaaaactctaatacctgggaaccatggaccatcacgcaaaaattaaaattgccatcctgcacagcctcaagcggatgcccaaaacctacacacagcgcgacgaggtactgcgcgcggaggtctgcctggacgtgcagccgcgccccacgctgctggaaatagaagacgcccttacggatttggaacaatcctcttgcatcattggcactcgcaatgaactgaccggggaacgcaagtggatgatcacggacaccggcatattacaacttggacagatatgaccatcccggacgccattgtcaccgttgcctccatggcctttagcctagccatcatttacatcttatacaaacaatgaagaaactccgtcaggacagcgtagccgccaatctgccgccctacctccgggatgcggtggatgaaatgttcttttccgggacgacctacaaggccgtgcaggaacgggtggcggaagacggcatcagttggagcctgacgagcattgcgcagtattaccacaaccacgtccagcctctcatggcgacacgccgccaggacatagccgccaagctcaacaagatggatgccgagggcttggacgaagcctccttgcaagcggtgcgcatgaccgtgttcgacctggccagcgcgccgggcagtgatcccaagacgctcaagatttttatggacctggtcatcaaggcccaacagatgaagctggatgaaagaaagctgtccttgctggaacaaaaggcggcggaagccaagcggctggcggaagacacattgaattccgcacgcaagggattaagcgccgaaacaatcgcagaagtggaagaacgcctcaagttactgtaacccatgggaagagccaagattaaagcccctgatacgctgttcctgccttgccaggcgaaatggatcaaggaccagtcccgcatgaaaatcgcggaaaaagcgcgccagatcggctttacctggtgctcttcctacgcggacatgaaggacacggccagagaaaacaatcatattgatacctggatcacctcccgcgacaccttgcaggccaagctgtatattcaggactgcctgaactgggcaaaaatctttggactggtcgccaaagacatgggcgaacaggtattactggatgaaggaggaaaaaaacaatccgcccaggtattacgatgcgccaatgaacaagtcatctattccctgtcctcaaacggcgacgcccaggcgggcaagcgcggcaaccggcgcgccgatgaattcgccctgaatcctgacaaccgccatctttatggcatcatgtaccctggcattacctgggcggggaacctgtggatatggtccacccatcgcggcagtcagaactatttcaaccaactgatccaggaaatccgggaaggaggcaaccctaaagggttttccttgcaccgcatcactctggaagatgcgctcaatgaagggctgctggacaagttgcagcagaaatggccgaaggatgatccacgccaggaatacgacgagacggactatttcaacgccgtgcgccgggaatgcccggatgaagaaaccttcctccaagaatacatgtgcatcccgtctgacgacgcgggggcattcattggttatgacctgatcgacgcctccgtttatcctgccggtacggcctgggaggaagaactaaacccggctgcccattatgccctgggcggagacattggacgtgtgcatgacctgacggtgctatggctgctcaaagtagaaggaaagagccgccggacggtgaggattattgaactggccaacatgccattttccgaacaggcgtctatcatcgacaaatatgcagccatgccttgggtgaagcgggtgtgcctggatgccaccggcataggtcggcaattagcagaagacgcccgccgccgtcacggcagcaaggtggaagaagtgcagttcacggcaggagttaaaggaagatctggccattaccctgcgccgctgtatggaagacggggaattccggatgcccaacaagccggaactcatttcagattttcgctccatccggaaggaaaccaccagcgcggggaatgtgcgctatgtgggcgagcggacaagcaacggccatgccgaccgcttttgggcggcgtccctggccatccatgcggccaaggaacatggaacgtgttccccccaccgatgggctgcaaccggcaggacatggcaacgctggaaaggagcctttagacgatgagacgtttaccaagatatgcctcccgcaatacggtggcgccgttttacgatagccttgcctggcgggaacgttacaatcccctgccggacctgacgccggaaagaacggttgaattgtactgcgcctggcgtgaagggaggtatgcggatgtgatgttcgtgtttgacgccctggaagaatgggacgacacgctgggcacgctggtggaccgccgcctgtccgcgctgggggaactggatcacggcatcagcatcaactccgatgcggtgggggatgatccggcccttcaggctctggccgacgaccagcagcagaccatgagcgacatcatgagccgggtctccaacatgagcgaggtcattgaacacttgggcctggctacgttccgtggattttctcacctggaagaagtaatcgacggcgacgagatacggctggaaccggtggaccagtggttctggaaccgtccgatgaagaggggaccctggttttacaatcccacggcggtgaacagcctgtcggacctgcaccccgtcagtgacggagaattgatcatccgggcggtgcctcgtccggttgacattgtggccctgttcgcaatcaccatcaaggcgcactcggaagccggctgggatggttttattgacgtgtttggcaatccggccctgttctttgaatatccgcccggaaccagtgacgaaaaggcggcggaatacgatgaaatcatgttcaagctgctgggcgatggccggggcggttatcctgccggcggtaagatcgtaccagtggaaacgacggccacaggcggcgtgacttttcaggatcgtgccgtgtttgcgaataaaaagatgatcatgcgggccacggggggcaccctcacttctctggcggaatccggaacgggcaccctggccggagaggcgcagatggaagtgttccggacgctggccaaggcggaagccgtgaaaatatccgaagtgatcagcaagcagtttgtgaaccgctggctggaacgcctctatccgggcaagccccgcctggtgtactggtccatggatgcggaggacgaaaaagccaagtctgccaacgtggacaagatcaccaagatggccgccgtaggctaccgggccgaagacgaggaagtcagcgaaatgaccggcatgcgggtgacttaccgggaaccggtgttgcagagcatgggaactcccggcctgccgttgcccctgatccgcaaccgcgaatatacagcgcccgccgtgacgacggaggaaaggctgcttaccgtgctggacccggaagcaatcaagcgccgtgcagaaatttacaccaggctgctggaagaatccgccgtgagcggccttgctgctgctgctgccgaaacggccgcccaaatacccgcagaaggagcgcagcctccgaaaacggacaatgagccgcaagacacaggaaaccccgttgcaaccccgttgcaaaacgcaggaaatgggcattccaccccggagggaggcgaacctgtgaagaatatgagccggagcgaagcggcaaggcacgcggccaatgtgcgctgggggaaggaacaagccaagggaaccagccgcgaaagcaaggaaaagaaaaagcaaagcactcccttggtggccccgaaaggctccaatgaaaagacgcaggtgaaagcgttgaaaaaagctctggaccgtgtggccaaaaaaggcggtagcgtgacgggagccatccacaaggaaggcgtgggcgctctaaccgtgaaagggggcaccgtagggaaaaagcgggaaggattcaagggaggcagcggcgtggcgcatgtgctgcgcaaacacggcagccagggcatgaccaccgggaaaatggccgttaccgccgtgaagggaaaagtaatgccggacccgcagcccagccgcagccggattgtccaccaggacacccaggtaatcgtggaacatgaaaacaagaaaggaagcggacgcaggaacgccaagggcggcaaactgcataccgcccacaaaaagagaaccccttaaacaagcgcgcccaggtcatggacctgggcctacggccggatgaacggagatatgatcctcccatctacatggtggtttcggttagaaccctccgccaccggttgccgaccggacttttacagtaacacatcatcatcaaacatcaagacacaaacaaagtcatgatcaacttcatcaaagaaaacgacctgcgccccctggacgatccgggagacggctggtacatgatcgaagccaacggagaacaccccaccacgctggaaaacggcaagcaaattatccaggtactggacaatgccgccatgctggacttgtgccggaactgggaaaaggaattgctggtggataaagaccacctgtcacgcaatccggacaatgacacggcagccaagtcgtggatgaagaacccggctatctgggacgataacgggaaataccacttatgcggctggcaggaatggacacccacggggctgaatctgattgaggggaaggaatacaagcatttttccacggaatacgaaccggaaaccatggaaagcctgggagggaaccgctacaggccccaccgcttggtcggcctggcattgaccaaccggccaaataatcgtgggcagaggcccatcacgaaccgcgaaagcggaaaaccaataaccgacaacacaccaacgaatatggaagagttgaaaaaaatagccgaacagctgggccttacccaagaggcaacccttgaggaagtcctggctgcaattgccaccctacaggaagcgacagccgaagcccaggaggcggaagcggaagcgatcctgaattcggaaggcgcggaagacatgacgccggaagaaaaaggaaatcatgaaggaacagatcatcacgaaccgggaacgcgccatcaaggtgctcaagaatcgtgctgccgccaaaggcaaagccaatcagcagggcaagccggccagtgctcccgtgttttcccgtccgatcatgaaccgctccggcatgaacaacaaggcggacaagacccgcaaggccctgtccatccgcgaccgcgcccatgaaatccagcagcgcaccggcatggggtactttgaagccctgtcccaggcgcagcgcgaacttggcgaagcgtaaccccatcataaccccaaccattagaaaggaattattcatcatgatctttcgagaaacagcagtagcccagggaatttccggggaagacctgcgcgaaaaggaaggctgcttcctggtgcgcaatgactccgcagaactggtatgcagcaccgccaccacggacaagcccgtgggagcggtgcacatcggggccgacaagggcagctcgaccacctacctcaaacccggattttccgggatcgtggccgtgaagctggggagtgcccccggcacggtcaaggaaggcacggacctggtgctgatgggcgacggccgcgttaaggcactcccgacggctgccggcacctacatggtggtggccacggcggcggaaaccggcgaaggcgaccagctggtcaaggcggtgctgcggcacccggccccggttacggtggccgccggctcctgatagccggttcattcatcaacggattaacacacacactagaacatcaattatgtatcaagatgcaaacacattcaacgaaaccctgacgattttcgcgcagggcttcatggcgcagcgggccgacagtctgatcgacttcattgcgccttatgtttccaccggcacggccagcggcgattacaagctgtttgacaagaacgacccgttccagatctacgacgataccgtgatcccggaagacggcgagagccagacggtgcatttcaacgcctccacggacaagtacgactgcgaacctcacggcctgaaaatccccatccgcgactgggagcgcaagcaagccggtgaaaaagggtttgcgctcatgcgtaacggcaagctcaatacgctgctgtccacacagctggtcaaccgggaatacaaaggctgggccaagatacgtgccgccgtaacggcggcatccggcaagggcgcctggtctggcacggccggagcggacaaggacccggttgacgaacttgacgccctgatcgaaaaaatcaacaacgataccggctccatgccggaatatatggcctgggggctgtccgcctggcgcgtattcaaaaatcaccccaaggtgctgtcccgcctgtccggcattaaagccagcgcaacggtggatgacgtgcgcggcatgctgctgaaccccaacatggacatccgcatcggctccatgccggtcaacacggccaagctgggcaaggcggctgtcaagaaaggcatcctgggcgcggacgtgttcatcttccacaaatcggaaagcccgactacggaagacatgagcgccgtcaagacgttcacgattgatgcccccggcgtggcggaagtccacaccctccgggatgacctcaaccacagggaatttgatgaagtgctctggtcggaagatttgagaatcaccgctccgatcgccattcagcgcatttccgtggcgtaacaactcacagcttccccgtttatggattggcaaccggtaaatgaaagcatcctggatgaagctctggctcccaatgagactcagaaaatccggatgaagcgtcaggacgcggtgcagcaaggcgcaccagatcctgtggccgagattgtcacggctgttcccgccgaaatccgttccaggatcgcggcaggcggccgcacccgtttgcggggaagcgagcaggatattcccagggaactgcgctgggtggccgtggctctggtgcgctggcgctgcttggtgcggttctccctgggggtaacagaagaacggacggcggactggaaccgcgccaacaaggtgctggatgatctttcttccggcgcttacgtcctggcggatgacggcggagactctacgccgcgcccccattattccggccgtcccatccgctgggggccgcgcacccgcaacggcgtcatgtaacgaaccaagaccatgccatccctgatcgacatcatcaatgccctgaaactgctgcctgtgaagcttactgcggcgcagtgggaaggcatgcgcgccgacatcagggagcgtgcctttttcatggcgctggtggatgaagctcatatccttcaggaacacagggatgctgtgaaagggatgattggcggcagcctgtccaagacggaagcccgcgaagcgataggagactacctggcctccgcagggtatcagcccccggagggcaaggaaggaaccatacaggacttgcgcaccgtgcaacgccagagcctggtgcttgaaaccaaccaggccatggtggccggctacgcgcaacaggaactgttccgtggctccgttgcgttcccggcccagcgtctggtgcgcattgcggaacgggtggaaaaacgggactggccgtcacgatggcgtgaagcttatgctttggtaggcggtgaaggagcaagcgcccaggaaatggtggccctgaatgaatctccgatctggacggccttgtcccgttttgatttgccctatcctccctatgattataactccggcatgggacggcgccccgtctcctggaatgacgcccagcgtctgggcctggtgaagccggaagacgcggcggcaattgccgcccagggcagaaaacgcggctccatgaactcgggattgcaggcgagtggtgccagcctggatgccgatgttatggcccaggtgacggttttgtccggagggcgagccgtacggaatggagacgcgcttatctggaagggagggcaagcggcatgatccgcctcaaggttgacataaccggcaagctggatttgtcccatgtggatgccaacgccgcagccatggaaggagcgcgggcggtttatgccgaagtactccatagtctggatgaaatggggcgcgcctcccaatcccgctatttttggccggaagcctcacaaagcatcatgcctccccagctggacgggaacatggctgttgtcctgatcaccaagaaaggagtgcggctgcactggaaaggtggaacggtacgcccgtcgggcaagacgtcccgtgtaacaggccgcccgattaaaagcctgctggtgccgtttgacgattccccaatacgccgccgaagtctggcggaagccggctatgatccgaaggaggtcatggtgctgaaatccgaaaatggccgcccgtacctggcccatgtccggaagtacaagagaaaggtgaatggcaaaacggccaaggttactccgctgggatatttcctcaaatccgccacgattgaagccaagccggaagtgatgccatccgcagaaacctttcaaacctccgtccgggaggcggtcatgcaatacctggatttacaatgaacacgattcaagattctccgggatttaccttttgcgagacggttatcaaccgtctgtgtgaaaatgaaaacctgcgtccccttgtgctggaacaaccctatgaccgggatgaccagacccaaaagctggccctggccgaccgtcaatatgacggagccgtggccgtcatgcccgccgggttgggcatggactggcagggagccgacaacgccagagtaagcatctggacggcacgggtggccattctggtcatggtgacggccaagacggatgaagattccggattgcgccggtcatccgccttgctggccgaagtgatacgcaccttgtcagactgggaccccgatgccggagacgggttgatcatggagccgtggtttgtgggaacggcggacttgatggcggaggatgtggccgacctggaaaacatcgtcgggagggtggtcttcctttctcgccgcatgcgagtgtaacaattttcaacccataaagaaccatggcaaaagtagaaaccaaacaagaacaggccccggcagcagccgagggggaagcaaagcaggaagcctccgtcaaggtgcgcatcctcaagacaggaaccgagattgacggctggcgttttgccgccggctcgctggtgacggtaacggccaaacaagccgaggaacttgccgccgacaaggcagccaagcgcgtgtattaacacctgacgtgcccgtcaaactaaagactaaatattaaatacaaaagactaaacattatgagtgcaacaagacgagtgaactaccttattggcggcatgccgatcaggattgccaaattcggggtaacggacggtagcaagacagtgggcgcggacgcatgtccggcaatccccacctccgaagctcccggcccctggctgtacctgggtaaaatcaagagcggccaggtggagcaggtcaagaagaacgtccagattgagggcgtgaatgacgccaccggcatgtatgaaatggaggatgtaaccatggtacagcagtacaagcttaaattcaccacgcagtacattgcgccggaagtgattcagcttgcctttggcgtggccgatgaactggcggacaaccaggaagccgtgccgtttatatccaacggtgaaatcaaggtctggctttatggccgcctgacggaccacgccgaaaacggcaaggatctgatggagtggtgcgtcatgggcaggctgcggctgacgaatactccgaatttcgcgtccgacccggcaaccgccgaatgggaactgagcattgaatacagcccgctgcaaaagctgacgcccaaggcgctggcggcccaggcatcagcctgatgaaaacccggagcggcgggggcaagcagcctccgccctccatatcccccgatcacgatcaagatggaattggtaattgatagcagaacaatggcggttcgctggccctccggggtgccggtaacggatttgtccctggtgctgggcgacacggtgccgatgcgcatccgtgtggaccacgcactcacggattgcacgccggcgctggcggtcaagcagacgataggcagcgccgacctgatcatgaccgtgaccgagtttacccgccaggatgactggcaagaagcgtcctgggtggtcaatacggttccgctccaggaggcgctggggaatgcggatagcgtagccctggtggccgaggtggtgctggtatctccggacggagcgcaacacacctcgcgcccgatcagggtgacggtgcgccgggacatcctgccggtggattacgcgccgcccgccgaggtattggccgattggcatgctctgattgctgccgccctggcggctcagttaccggacgccctgcacgatgccggcatgtatgtcactccggccagcggcacggcatccatgtcgccacccggctatgaccaggaccagaccgtggcgtggtcatgggcgcggtttaaatttggggatgacacgttggtcggctaccagggtaacgtctgcaaggtgcgcgacgtgtacatgtgggccgtcctcggcacgacggacaccacaccgcgctggctggacatctggcgacgtgctccgggcggggactgggtattggcggcacgatccagccaggccgtagcatctagcactgacgtggacttgtacatgtgggggatgattggcgatacggagattgtgatcggggatgaggtggcgctgcatgtctatggtggcacaccggaggcgccagtggagctgcccctgtccatcgcccgccagatggtgacggcggctgatgggcgcggcatagcgtctgcgctggacggaccgattaccgatgccaccgtcatgcccgcagtgatgttgtcctgcacttatcaggacggcgtcagcgtgggaggggttaatctggccacccgcgccgaggtgcagcggttgacggattatgctgccgctaccagcaagcagacataccaggatgcccgcgcatccgaggcggccagggacgcggcccaggagattgccgagggtctggccatcactgttggcacggtcacgacgggcgagccaggcagccaggcaaccgcctccctgacacccggcagcacgccgggatcgtggcaactggatatgaccataccgcgcggggacgtgggcgctgtggacacctccaaatcctacacatggacacagccacaggtatttgatgccaccgtcacggcatccaggggcgtgcgcgtgcctcttcccgccacggcccaggaggcgctatcctatgaggcactgctagagcagcaggccgcggataattggcggcggatgaactactacatggaaacgctgatcccgtcatgggtgacaacactggtgcggcagatgcagatgtccgacgcttataatgtagtcacggcaaacgcatcctctaaggaggcggtgtataccaacgatctgcacgattttttgattaccatgacgccctccgccggtgtgtctttgattggccgatctacaggcgcgtggaaatttgccaattacatgggagatcataacaatagtgcttatgccgccgccgttgtatggcggattatcggctctgacaaggcgtctatcctgctggggagcacatcccaagggtactcatcgacaactaatccggcagcgccctgttatgctcaccccatccattgggctgactacaatctggacgcagcggattacaggtatccgttgctcaacgcagtcaataattacaccagccgggacatggcacccgcatggcaggtgacgatttaccccacaggttacttggggagcacggcttcttgcctgatccgaggcacggattatgggcgcgacgttggcgaccagctatatatgtgggcacttgtgcccaagatcacttacgttgccgtggcaatggcaccccgcgcaacctctgatcatcaaaacaccatgaacagatgggaactgtttgtcgatggcaattatgttatgccgatgacatccttgttttgtggcagcggccacacggcctgcgtcacagttaaggccaaggctcacgaggcaagcagtaccttgcaagtggggctgcggatgggaggcatgaggattgacgcagcccccgcgctgggagtcaacgatgtacgatccattatggggcgcgtggtgatggacggagtaacggccaagcccatgccggcggtgacggcttccgcgctggatgtacctgcggagggcggtgaggtaacgctgacggtgtcgtccacgctgtccgaggcggtttatatactcaacgataccatgtgcgggcatgaccccgccgccgtatggtgcatgcagtcctctgagcagacaccagccggaggcggccagatcaccctgacgctggctcccaacacgactggccagccccggcaggtgtgggcgtttgtcggccatcactatgcccaagccgccgtcgtcaagattaaccagttagcgcaataacaccatgcaagagatacatttacagtttccccgacccggacagtggaacgaatttgttatgaccgccagattcccggacaacaacggctttgtgcgctccctctgctatacacaagcggatatacccgccgcccaggcaccggccctggaagcggcggtggccgcgattgccagcatgggcgaggactggcaagcctcccaggcatgggcgcgcctggtgcaggtaacaacttacagtgataatcaagacagcccaccaaccacgaccgaggctgtagagctgtccgtcgaggccgtcaatacccagggcggacgccggacgttcacgcaggtggactacccggaattcgtcatcacggaccccgccgccgtggcatttttcaaatacttcacttccgtaacccttaactgatcatcatggacgcttaccgctcgcaggatacagtgatctaccgcccgatcggggacggtgccccggaggcggtggcattgtgcagttacggggacgtgatggtgtccctggtggatgtggtgccctccgttcaggtgcagcgcgagactgtgatcggcagccgctggatgcaccaggcagcacgcggcaatgccggatttcagatgtctttttctctggcgcgggctttcgatagttatgccgctgccagggcttggggattagatgcagcggaattgctggcgatgtatccggagggcatggtcacctggatgacagcctatcattccggcattccgcagaggacgcgggagtaccacgctacccttgacaatgtgcatcccttgccgccgaccaacgatcagcggtatggagccacggcgttttggtgcgtcctggaaattcaactctttttgactggagatattgactaatggattacgacgtaagcatcagcatcggcacaaccgccaacctgggcggcctgcgcaaggcccagcaggccgtggacggtctggccaaggctgccggcaaggttcccggcagcttgttgtccgggggagtaggtggtgcatcggccccgcctgtctatacgggcactgctttctccaatggcggcatgtcctggcagctggaaggcgcgtcggaactaaccgggtccattaagcaggtggacaagaccatcggggccgccgctcagggtctaaagacaaattcatcttggctttcgcgcagcatttccgcattggcaggattacctggcaagattcaggattggggcaagggaggcatggatcagatgcgccggtttaacggcggattgcagaatatggctaacatggccaatctgggaaaacaggcatgggatattggctggagcctgggacagtccttgtccaatgcgtttggcgtaggagcggacaagatcaaggataaagtggccaccgccctggacgcagccaaggccaagatggccgcatggcaaacgtcgctttccgaaactctctcacggcagaaagaagaaaaatggttgaagaaggaagaagccggcgtcaagcaaatcaatgcggcctatgaagcccgcaagaaggtaattgaagacctggaccgcaaggcccaggcgcggctggaattggagaacaagcttttacagattgaaaccgagaagaaccgcagcatcatccggcagcggcaaatcagaggggatatttccgattcccaggcacgcgacgaactggccaaactggatgccaaagatgcagaagaccgccgccgcattgagcagcagcaggcggaacaagccctcaagactgcccagcagctggccgaggccaaggaggaacaggtgcgccgcctccaggagttccagcggatgcccaacaagggcaatgtggagaatttgagcaaagaaggcttgttcgggcaagtagataacctcaaggcagcagatgccgccttgaaggattggcaacgtatagcgcagcgtaaagcagaactggaaaaggacattgtcaaggctgacggcaagatacgggacgggatgttttccccgataaaagccgccttcatcccgcagtggcagcaaaagaaggcccaggatgaagaaagcctcaagtccgtcctggccgaacaacaagccatggccggccagtacggcatgcaggggcaggattttagacaggtggcagctgtgctggccaagcggtcccaggatgcccgcaccgccctggacaagtccatggctctgatcaaggacaccgggctgctgggtgatttgagcggcaagtcaggagatgccgtatatctggaatatgcgcgggtgctggaatttgcacaaacttttattcataggcagacagatggtatagaagccgccctcaaagaatccgtagccgcccaggatgccgttgaccaggccggggcgcgtctacgggatttgctggccctgcatggtgcgcaacgtgcagccgagacccaggtatccgctgaaacaggaaagaccaacgcccagcaggacgacaagcagcatgcggcaacactggccagcagcatggctgaccgtctggtcaaggccgccgaagcccagcacaaggcagccgaacggcaaaccagggccgccgagaatactaaaacgcagctggggtatgcggtggacagcctgaaccgctatgcggaaaagtatgaggacacgccgctatccggaggcatagagcggatattgcagaccattaccaagctgcaagggaagcccgttaaggaccgcaccaaggaagaaaccaaagacctggaacaactccgcaagtggattgaaaacgtcaaggatgatggacggtttgacaatcttgtcaaggcggcgacggcggccctggataacatggacgccgccctggcggcggaaaagaaacggaaggaagccgaagccaaggccaaaaccctggaagaacgttcccgcaaattggccgacctggacggacagatggaccgcaagagcaaggatgccctcaccctggatgactggatgatcaaggagcgcggacggctcaccggacgcatgggtgagctgggacgcacggacgtgtccggacgcctcccggaagtggaggcgctggtgcgcaaggtactgtctgaccagggcgacggcggcaagggaatttcccgccgtgaatccggcgaactcaccaggatgttgcagcagctggaagccatttccccccgtgatagcactccggaactggaagcggccatgtccctgatccgggaaatgctgaccagctacaggaccacgtcagccaaccaagccaggacactggcggaactcaacaagctgcgccaggaagtggcccgcatcaagagtcaaacacagttcggaccacgtaaatgaaaatcatcgaacttacagataaagccctggaagatgcgtcttacagttggcaaaattttacgccgatgtgcgtttcctggcggcagatgatccgccgcaaaaatgagccgcccccttatgactacaaggaaccggtgcgcgtcgtatggtccggcgtcactatcatggaaggaacggtccggaggtgccgcccctccttttccggtaacagctgggcgtggaatatagaggttcatgacattctcaagcccctggaagggacgctctgctttaatgcctccggcagtctgaaaggtgccttgaatgccaatgtagcaggcggcagtgatgtggacgtgccgcgcaaaatatatattgcccgcacggtgaacagtatcctggaagatgcccgcaagtatggattgctgggggcggacgtgggcattcaggtggacgtttcctccacggcctgggtatgggacacggcgctggcatgtgatacttacgcgggagtgttgcgcaagctgctgggggcgcgccctggtatggtgtgctgggttgattattccggttcttcccccgtgatcagagttgcagatggagccagccttccagtggtcacgctggatcgcgccggggatttgctgacggccatagatttggacccgcgccatgacctggttccccctgcggtgggggtggtgctgacggcagggcgcatggcctatcaatcccaggtttggccgcgcggggcctccctgcgccaggagggatgcgtaaccgtacagatggccatttccggcaacacggatgaaacggaagaagaaccgccaagctccgagtctcccatgtgggctttccttaaacccgaaatactggttcttggcgacaagctgcccaccggacctgatgatgctgccgagtggtggcagggaaaagttcccaagctggcggaggttccgggagcgcgctttggggcggtcaaaaaaaccatcctgaaaaacaaggccagcgatgccagcaattacagcacggcggaaagcgcccaggtttatgagttgttcaagggcgatttgtcgccggtgtgtaaactcatcaagtggtgttatgtcttgctgactcaggaggtctatatcacggtgccgccccgtccgggctttgagttgcttttcggaaagcaaaaagtggtgaacggccaaaaacgctggtacagcaaactgacatggagggggcgcacggtcaacactcccaagcgctggtacagggccgacaagtccgggacaacggggccggaagatggttccacaataccggacaagccgggcacaggtggcacagagcaggaatggccggattataccggcgtcctgcgggattattatgagattacccggcagcttccctgggaagggacgttgcagtcattgcgtgccttgtctcccgccgggttggtaggtcgtcaattatctattacgggcggccgcgcggaatgggtggatatgtccaccgtggtgcaaggggtaagcgtagatttagccggcagcagcacgtctattaacacaggggtgccagcgcatttgtcactacaggacatgctggaccgcgccaagtccctgcaatctggccaagatgtgctggaccaagatgatcagcaggataacccaatcctgactatacaatacgacgataatgcctacaaatcaccggaggcccctaccatcgggccggagggggaggttatttggaatgaggctcccgaccgtccggctggttttgggttccaggttgtcctggactgggatgacgataatactaccgtgaccggctatcggttgcggccggggctactgcttctcaacgggacgacgttctgcaacgccgccccggaacctaccgagggagactggtacaagggggccgttaccagcggggaaatttggctcaatgtgaggttcagcggcaaaggcaagtaccagggcagcacggtagcgtattcgcaaggtcaggtgaatcctttgcgcctccaaccggaagaaccggacggggaagagttttattactccttccacctggccacgattacacctgaccatgaagtcatccagtatgaactgggttccatccagattcccgttcatggcggttccaattatccctatggcccagcctgaaaaatagaacaacgatgatcagaactaccattttaactttcaatcgtgatgcggcgctatctctggcggcattgcgttgcgtgcgccggcgtttgccggatgccgctgtaacggtggccgatgatggacacgatccggtcacggcagaggtggcctcccaaatgcaagccctgggtgccaggtatgtgcagacggattttccacggcgcggcaacctcaacggcagttcctgtgtgcgtggcatcctggcgacgttgctggacggcacagccgatgacgatgtagccatcaagctggatgccgacacggcattgcgttctgacggacctgtgcgccggatgctagcggcgggtgcggaagggttcggcagctgctgcgacggacggatcatgtgcggcctgtgctatgggttcacggggtccgcgttgcgccggatgcttgcagttctggaccggctgcccattgggggtgacgatccggaggatatagcaacgggacgcctggccatggccgcaggggttccgcttcatatagagcggccctgggcggcatcacggccggaggggcgctgggcggcctaccgctggccaacgatgccggcagtagccaaatatgaccggctggacgtggtgacgctgggcactcttcacatgccccggcagcagatggacgcagcagaattcattcgcgtatttgacgagttggccgccagggacgtgatcggggagtagggaggccagttcaagccgttttcaagggaggtgcaaccaggttgcaatggggatgcagcgggcagacgttcaagggcgtttttccacgatgcttgataatttttctacgatgcgctgcgacgttacaggtgcgacggccaacacaggatcgtgaaacccgctcaacaaagtttcaatccacgcacccgtgagggtgcgacgcggaagaacaccaaggtgacgggcaacaccatcgtttcaatccacgcacccgtgagggtgcgactgcggactgtcgccagggagcaggccaaaaactggtttcaatccacgcacccgtgagggtgcgacctttcggctgcggcaaaggcctgctgctcttctggtttcaatccacgcacccgtgagggtgcgacttagagcacacaaacaagcaggcacattattgccgtttcaatccacgcacccgtgagggtgcgacaatccgggtcaaatacgaggactgtccgcacatcgtttcaatccacgcacccgtgagggtgcgacccgcgtcaaaatcgagagtaaggaggacctggcgtttcaatccacgcacccgtgagggtgcgacaatccgggtcaaatacgaggactgtccgcacatcgtttcaatccacgcacccgtgagggtgcgacccgcgtcaaaatcgagagtaaggaggacctggcgtttcaatccacgcacccgtgagggtgcgacaagctggtttgacgataccgcgctccggcttccagtttcaatccacgcacccgtgagggtgcgacctgttatatcggcgtcgataccggggaaagcgtagtttcaatccacgcacccgtgagggtgcgacctgcggagcgggacatattgttaatgtactgcgagtttcaatccacgcacccgtgagggtgcgaccaaactaaactaaactaaaaatatggcactgaaagtttcaatccacgcacccgtgagggtgcgacctggatgacatgcaccagttggacgccgttggaggtttcaatccacgcacccgtgagggtgcgaccggccaagcaactttcagagcagaggaaaactaacgtttcaatccacgcacccgtgagggtgcgacggcggaagggaatatgcattgaaagttagtggtacaaacagccctttgcgccaacctctttcaagatgcatattccttacccccttatattttattggaaagaatgtcaatctactgatttcaaggacttacagaaatcgccgatctcccggggaatttctgtgagcttgaggttggcgcaaacagtttatcggttcagcaattcattttggaattgctgattcccatctggttcaccaacctgtttttgatgctagatggtcaagggtccatcgtccagcaactttttctccacagccattttgaaatcaaaaggccgctccatattaatggagtggccttgaagtgttttccggcatcggcggctgtcaaaggcgccgttaacgcacacgggcaatgagccagtgcaacaggtccttgatggcgacgcgttcctgttccatggagtcgcggtggcgaatagttaccgtgtccttgagggaggcatcgttttccccaagggtttcaaagtccaccgtgatacagaaaggtgtacccacttcatcctggcggcggtagcggcggccgacggctcccgtttcatcatagaatacgggcatccacggctggagcgttttttcaatttcccgggcgatgcgcacctgttcctcgtttttcttgagcagcgggaaaatagcggccttgatgggagccatccggggcacaaagcggagcacggtacggacgtctttcttgcctttgtcatccaccagttcttcttcatcataagcttcacagatgatggccagaatggtgcggtcacacccggcggagggttccaccacatggggaatgaatttttcccgcgtttcttcgtcaaagtattccaacgggcgtccggaacctttctggtgacagctcaggtcatagtccgtgcggtaggcaatgccttccagttcctggatgccaaacgggaattcgtattccaggtcataggttttcttggagtagaaggctcgttcgccgtccggaacgtccagaatatggatgtgttcgcgcggcacgcccacttcgtcatagaagcagaggcggtgttccagccattcatccaccaggcgcagaccgtcttccggccggcagaagtattcgatttccatttgttcgaattcgcgggaacggaaggtgaagttgcgcgggttgatttcgttgcggaaggatttgccgatctgggcgatcccgaaggggagcttcacgcgggagctgtccaggatgttcttgtattggcagaagatggactgggccgtttccgggcgcagccagccagtggcattgggatcgttttcatcggaggtggctccgatggtcgtcttgaacatgaggttgaattcacgggcttccgtcagcagggaaccattggcggggttgtacatggtggagtccgttatggcctccatgcgctcgcctttcagttccatttccttgtgggagacgtccttgccagccagctgggcatagtactgggccgcagtcttgcgggccttgtccgcctgtttttctgagtccaccagcacggagtattccttttccatgctccaggagccgtcctttttagcggctccggtgtagaaaaatcccatgccgctctgggccggcacctggtcggcgcgcaggcgttccttggtcagcaggcagtcgcacatcgggtcggagaatccgcccacatggccggatgccaccagtacggagttatgcgtcaggatggaaccgtccatgccgaccacatcgtcgcgctcctgcacgtttttgcgccaccagtattccttgaggttgcgcttgagttccacccccatgggaccgtagtcccagcaaccattcagaccgccatatatttcagctgcctggaagatgaaaccccgccttttgcagaggctcacgattttctccattcgggcgggatctgtattggttctgtctgccatgataatatctataattgggttggctatgcgggttgtattgatgaccgcaatcagcggccagtgaaagcaaaaagcgtgtcttctcaagaattccaggggagaggcacatccttgagcagctgggagtcatatccagcttccaccagcgtgcggaaggcttccatcgcctccggagtcacaggttgttccgtggaaaaaccgcgcctggggtattccagtatccgctggaagtcccccaccatggcggagacaaccagctcccgcggcagttccggggtcaagtattcccggaaagtgacgggaggggagctgaccgccacctgcgcttccggccactgggcctggagcgtagccagcgtacgccgctccatgtacggtttttgcagggcaatgaggctggcagggtccgggatgccggcctttttcaggattgtacgggaaaagcggacgttttccccggtgttggtagatttattttcaatgaggatacggtcttccggcactccctttttcatggccgcctcagcaaagagttccgcttccggcacggcccattccccggtgaaccgccccaccccgccggaaaacaggagaagaggggccagcttccgcgcatagagttccgccgcatattccgccacccgcacgtcattgctgccaaggatgaagatgaggtccgccgggcgcagctcctgcttcacatgatggtagtcccacaaaatttctatcgcttcttccggagtcatcggccctatgtacccaagaagttcctttctgtaaacgccggattcaccacagtccgtatttgccccattccagcgcggcccatcccagcagcgcattcgccaccgcatgcatgacgatgacggcgcacaggtttttctgccacacggcaagaaggtacgccaaggaaccgtaaatgaaggcgccgcagtagtccacaggctggtgcacggccatgaaacagagagtggtcacccagtacgctttccagctatgcgtgccgaaggggattttccagggatggtccaggttcaccatcaggcgcatcagataaccgcgccagaagagttcctccaccagcgccaccaccaccacggcacggaagaagcgcaggaccagcgccgccagccagctccaggaatccggggcaaagacgacgccgggatcaaagccttccgggcgcatgtcaattcccagcaggtaccggtaccatggccaggaggggtggccaaaccatgcatccggaccgcccggcagacggtccgccgccatcgtaggggccagccagcacaggatgcccagcacgccgaagaggattccccatgcggcgggtttccatttccagtcccagtcaatggcttttctccaccacaggagcaggacaaagcagacgatggcctgcacagggtacagccattgctccggcgcccttctccaccaggcggcggcggggtggttccattccaggaacggcccgccaagctgccacagcagggtaaagcccatgaacaccgcaaacggcgctacgtacgcccttgttttcaaggcctccgggacggagttcatggacgcggaggggtcaggaaagagttttcacgaaacgctccatgcggttgcaggcttccttgatctggtcaaaggcagtcgcatagcagcagcgcaggaagccttccccgcttgcaccgaaagcggtaccgggcacggcggccacctgctcttccatcagcaggcgcgtggcaaattccttgctggaaaggccgaatttggaaatgtccgggaaggcgtagaatgcgccgccgggcaaatggcagtccatgccgatttcattgaaccgcttcaccaggaagtcccggcgctgacggtagctttcccgcattttcatcatggcggaggttccgttttccagtgcttcaatagccgcctcctgggaagtgatgggcgcgcagagcatggagtactggtgaattttcatcatggcggagatgagcggttccggcccgcaggcataacccaggcggaagcccgtcatggcaaatgccttggaaaagccgtgcagcagcagcgtgcgttccttcatgcccggcagggtggcgatggaaacatgcggcttgccgtcgtaacgcagttcactgtaaatttcatccgtcagcacaatgaggtcgttcttgatgcagaggcgggcaatttccttgagcgtttccacaggagccaccgctccggtcggattggtgggaaagttgagcatcagcaccttggtccggggcgtaatggaggcttccagcacggccggattcagggcaaacatatcctgcttgctcgtaggcacggcggtagccacgccataggccatgttcacgctgggtgcgtaggagacgtagcagggttcgtggtaaagcacctcgtcccccggattcagcacggcgcgcagagccaggtcaatggcttcactgacgcccaccgtcaccagcacttcatgcagggggtcgtattttacatggaagaagccttccacatatttgacaatggaacggcgcagggattccaatccgtagttggaagtgtaggaggtgtgccctttttccagggagtaaatggccgcctcgcggatgttccacggcgtgacgaagtccggttcccctacgcccagggagatgatgtccgtccgtcccgtgaccaggtcaaagaattcccggatgccggaacgggggatggagcttacctgctccgcaattttgttctgccagttcatgatgatttctttcgtgtcggcaggggcttacggagcaacagccaggcgttcattctgcgcgggggcctcgaacacacagccgtttttcttgtaggttttcagatggaagtgcgtggaagtggacagcaccccttccagcgtggacagtttttccgccacaaaccgggcaatgtcacgcatgctttttccttccaccagcaccagcaggtcaaagccgccgctcgccagatagcaggaggagacttcgtcaaaacgggagatgcgcatcgccaggcggtcaaagccgccatcgcgttcgggcgtcatttttacttcaatgaaggccgctaccctgctgtcgtgttcgtattcctcatttaccaccgcctggtagcccagaatcacgccttccttttcccactgctcccgctgggctcgaacggcttcttcagtcatgtcaagacgttcggccaattcgccatcgctcaagcgggcttgagtcgccagtaactgtagaagtgatgcagtggacataaaatttcaggcataaaagacccttttatagcgaacgtgtcaagaacacatattacgcaaggctgacatccgttctttccaacataataaaatacgttctttttcttcaaaaaacagccgccgttccgagaatataatgctattgccttcaataagataaccattatttcaaacatccgttggaattattttcagagaatagttgctctaatccgccttttgtgccatagtaaagtgcatagacctgtagcgtccctttacaaggaacgcttgtttccaatttttatatgacagtctgatattatgagcatggcacttaacccggatagggctaccctgaactttctcaatgcctttccggaagaaatccgtctgcgcggcgagaagctccagaaagacggagcggttacgcaaatctttggcaatcatttgtatattcagggccgtgtggaagatgcgcacggcgtacaccgcgtgaacctccgcctccagggcaacaggtggttcggggcttgctccacggaagacgaggatctggccggagcggccatgtacgccgccatgctggaacgcatgtaccgcggccaggatcttccggagtccccgaacgaacttaacgacgttcccctgctggatattctggaagagaagctgggccgcgaactggatgacaaggaagcggattacgtcagcaagctggagaagcgctaccgccgtttcgccattgagcaggaaatccatgaccatgacatggtgcgcctgaatccccgctgggaaatcgtcagctatgacccgctggaactgtggcccgtgcctcccacgaacatccttgaattctggaattacatcgcctacgccttcaacaagaggcgcctgccctacccggaattcatggaatccatcacggacctggaaaaagttcagcgcaagattcacgaatgggagcgttcccgtgaagtaggcacttggtatgaccgcatccagtccgtgaatgaacgacccccgcagccgccccgcggagagctgttcatgaggctcgtttccaccatcaacgagggccatttcgaataccgccattccctgaagcaggactggattcccgtccgggaaaagcaggatttggaacatctggaaaacctgcatgaacgcgctgccgtgcgcatggatgcccagacggaaatcctccttgtatccctgtccgattacgcccgtgcggaagacgccctgacgctggacctggaccaggaagccgcgtgcgccctgatgaacaagcttttccaccagcccgccctgaaaggctacctggtgaacctggatgaaaattatttcaaggtggtggacgaaccgctcaagtggatttgccaggacgaccccattgagccggactgctacgccctccagctcgccacgtccaccggcatcaacgtctcccactccgtccgccagcttcccggccagcaggagctgtaccagtctgacgaaaccgtgttcccgggtcccccccgctggctggagagcacggaagtggaaccccgctattccattcccaagcaggtcatcgacagccttgaaggggtggaattcctgcgcaagatcggcgcttcccttccccccagcatggaggaccgcgtggtggacattgacctccgcggcacctttgacatgaagattgtccgcggcctcacctccgcggaaacggagcacgtgctctgtgaagtaagcgccagggacgcttccggctaccgcacggaaaaactcggcaaggacggctgggacgtcgctcaccaggagcccatgaaaaacaaggccctgctgcgcttcatccgggagcacctctatcccattcccggcctgctggaagaaatgggcttctcctatgatccccaggtgggcgctttcaaggcccgcgttacccggcagttccctgaaaaatttgcggagtgggccaagcagctcccggaagagctgaccgtcaacatggatgacaagctcaagacgctgctggcggacccggtggccgccgccgtgcggtttgaagtagttaaccaggagattgactggtttgatctccgcatcgtcattgacgtggaaggcgtccagctttccaaggaacaaatccgcgccctggtcgccgccagaggcggctacgtccgtatggacgacggaggctggatgcgcctggaaatcaagctggacaacgaccagcgcgacgccgtcacccgcctgggcctggaccccttcgacctctccggggaaacccaccgcatgcacgccatgcagctggcggacccgaaggccgcggaagtgttcgacccgaaggcctggaaacgcatcaaggaccgcaccgcggaaatcaagatcgatgtcaagccggacgtcccctcccagctccaggccaccctgcgcccgtaccaggtggacggcttccacttcctggcctatctggccacgaacggcttcggcggcattctggcggacgacatgggtttgggcaaaaccatccaatccatcacttacgtgctctggctgcgtgaggaattcgcgcgcaaaaacaaatccaagaagaaaatcgccgttcctccggtactcatcgtctgccccaagtccgtgctggatgtctgggccggggaaacggagaaattcgctcccggcgtgcgcgtactcgtcatccgcagcaaggatcaggccaatctggacgacatccggaagaattacgatatggtcgtggtcaactacgcccagctccgcgtctgcggagaaaccctgaaccagatcaagtggctcacggtcatcctggacgaaggccagcagatcaagaacccggactccaaggcggccaaggccgcccgtgaaatcgtctcctacaaccgcctggtcctttccggcacgcccattgaaaaccgcctgctggacatgtggtccctcatggccttctccatgcccggcgttctcggttcccgttcctacttcaagaagcgctttgacaagcgcaaggacccgcagagccagaaccgcctggccgcgcgcctgaaacccttcctgctgcgccgcaccaaatcacaggtggcgaaggacctgccccccaggacggaagaagaagtgtacgccaagatggaaggcatccagagccagctgtacaaggcggaactccgccgcatccagcaggccctgctcggcctggattcagacgaatccgtcaagaaaaacagcttcgccatcctgcagggcctcatgcgcctgcgccagatctgctgccaccccggcctggtggaccccaagtacgccaaggaagacagcgccaagatgaccgccctgttctacctgctggaccagctccgggaggaagggcacaaggtgctcgtcttctcccagttcgtctccatgctggaaattatcaagaaccggctggaagcggaaaacaggccgcttaactaccttaccggccagaccaaggaccgccgcggggaaattgaaaaattccagactaccaaggacccgtccgtcttcctgctctccctgaaagcggggggcgccggcctcaaccttacttccgcctcctacgtggtcctgtatgacccgtggtggaacccggccgtggaaagccaggctattgaccgtacgcaccgcatcggccagaagaacaaggtgattgcctaccgcctgctgacgaaggactccgtggaagaaaaaatccgcatcctccagcatcagaagaaccagctcgtcgccaacgtgctgggtgacgagggcttcacctccagcctgggcattgacgacctgaacttcatcctcaaccacggggatgacgaagaaggctaagccgatggcggtgagtagagagtagtgaatagagattaattatttcaacttccggacattggtccgctcattctttccctactctctgatctctcatcattaatcgctataaaaaagccctgcaatttcatgcagggcttttttatttcaccatttaaggctgacagggtccgtatgataaagaatcccggcctcgtcacgcacaagaagagttaactggatgcgcgcaggaaggcgcagcatctggaggccgttgaacgcaaatatctgcccctggcacaacaggggacgggaaccgaacagttcatccccttcaatcacctgcgtgccgtcttcatgggaacggacggtccactttttaccgatgatgcgcacggcgccttcccccgtattgcggatgctcacattgtagggcacgggaatgcgcccgtcgtcacggaccatccgctccagcttttcatcccgtgaatacaggctgcgcggcgtgagccgcacttccagggtggtcaggagggggagaaccatacgggagccggggaggaattatgattccacaggagccagggccgccttcatcagctccagcgtcgtcttgcggatggcttccacgcccgccttggtgggcttggcgtccggagccagcgtcatctgctcctgcaaggtcgtcagaaggttcatgatttttgcaatgtcccggcgttccttcatttccggctccaccccgtccaggatgtaatggaagtattccggcacgtccggctggaagatgaccttcgccttgtcctccgcaaacttgttatccagcgccgcggtagcggcatccagggcgcgtatccatcctcccaggccaatcaggttcgccatgtcggaatcccgcagggaggcaagctcctgttccacgtcggactgaatcagggccagattattcttgaaactgctcaaatccccgtcttccgcatttttcagcaggctggcggcatggcggttcacccgttccccggctccgatggccttcgcatagctggagaggtccagcgcaatgggcttcacttcgttcatcttgccgcactgcacgatcacaaagccgtccgccatcatgccgccaagctggagagccagggagcagcggtccatgggggggcgttcgggacgcgcgcgcagcgccacgttctccggaatttccggcagcccttccaggtcttcaaaaatcttgcggatggacggcgcggtaaattcgttgatgcccagctcctcattcatgtgggagtcgtccagcaggcgttccggaatggccggctggccctgcctgtcctgcttgccgggcggcggcgtctgcacatccagcacggcttcctccttctccggggcgttttccttcgcggcggcaaacgccattccccccgtgacggatacagccgctgccagcacatacaatctcttcataacaacactcaaaaaggttaagcaaaacggaatatgtcttgactctcgccctatggtgtcttatacgggcgtcacgtcaaggaaatcccccgcgcctgacgcaaaaagataccaaacaccctttgcaagccccgcatgtctttaaattacaattttatctggctcctgtgctatcttctggttctcgtcggcctggccggatacggctttcaccgcctgagcatcgtttacctgtactggaagaaccgcaacaacaagccccagcccaagtcccgcttccaggaactgcccgtcgttacggtccagctccccatgttcaatgagaagttcgtcgtggaccgccttctggaatccgtagccgctctggattatcctcaggacaagctggaaatccagattctggacgattccacagacgacaccacggaacagtgctaccgcaaggtggaggaactgaaggcccgcggctttgacgccgtctgcatccaccgcacggaccgcacgggcttcaaggccggcgcgctggaagcggccaccaaggtggccaagggcgaattcctgctgattctggacgccgatttcgttccggaaccggaccttctgcaaaaaaccatccatttcttcacggatgaaggcgtgggcctcgtccagacccgctggggccacatcaaccgggaatacaaccttctcacccgcgtgcagggcatgtacctggacggccacttcgccatggagcagacggcgcgcaaccgctccgggcgtttcttcaccttcaacggcaccgccggcatgtggcgcaagtgcgtgatcggggatgcgggcggctggtcccatgacaccctgacggaagacatggacctttcctaccgcgtccagctcaagggctggcgcttcatttacctgaacgatgtcgtcaccccggcggaactccccgtggacatggacgggttcaagtcccagcagcaccgctggaccaagggctccatccaggtctgccagaaaatcctgctggacatctggcgctccaaggctcccctcaaggccaaggtggaggccaccacgcaccttacctgcaattattcctacctgctcctggccctgctctgcttcctggtgtaccccatctgcacccagcgcattccggaaaatgaaacggtcttcatgtggttcgtgaacgtggccctgttcttcatgaccagcgtggccgtctgcatcttctacatgagcgcccagatcgtggtgcgccccaaatcctggtggaaggagctgccctacctgccgcttctcctcacgctgagcgtgggcatggcggtcaacaacgccaaggccgttctggaagccatcttcggccatcagtccgccttcgtccgcacgcccaagtacggggtggaccagaaggaaaacaggcagcatgtctcccagctcaagcgcaacgggtacagggccatcaagtccgtcgtcatccccgtcctggaaatcgcctgcggcaccttcttcctgaacctgatcatcatcatgatccgccagggccattacctttcccccatcctgatgattcccttcctgggattctactacacggggttctgctccctgggccgcatgatctccaacctgctgcccgccaagcaaactgccaaagccaagaactgacacctttcccatgcctgcgcctctctcgcaagcagtacgcctgattcaactcgccggcgccgccttcgcggtgttcggcgccttggtatcctgctcccgtccggactaccagcccaccgccatcgtcaaggatggcgccgtcgttagcgtcagggaccagaaaatggccgtcatgcgcaacggacacgtcgtaaaaacctaccccatcagcacttccaaattcggtctgggcgacaggaaggggagctgccgcactccgctgggcgcccaccgcatcgcctccaagatcggcaccggacagcccaagggcatggtgtttaaaagccgcaagcccaccggggaatgcgtggcccccaattctccgggccgcgaccccatcgtcacccgcatcatgtggctggaagggctggaaggccgcaaccggaatgcccactcccgcctgatttacatccacggaacggcggaagaacgcaccatcggcacgcccgcttcctacggctgcgtgcgaatgaaaagcaatgacgtgtacgaagccttcaacctgctccggaccggggatcccgtcgtgatcgaacgctgctccatagacgcttccctgaaagctctggcccaggcggaaaaaacgcaggattcctccctgctggtcatggcttccgcaccgtctctcatggagaatgccaacacggcttccatcatttcccaccgccgccgggcatcccgtcctcccgccgtagccctttcccgcaagcagaccgcggccgccgggaagaaagcctctccccacaagcggacggcagtccgcaagacagtgaagagctccaaagccgccgcccgttccgccagggggacccgttacaccctcggctgaaccgaccttccccgccattcttccggcattcccgttcctccgcctcctgacatggctgtttgaacgcatggttgcctgcgtccgtcacatttgttaacgtagacttatggccatgatggaacatgaagatatcagcaatgaaaacctggcgggccaccttctggtttccgccccctatctggacggcggcggcttttaccactccgtgatttttctgagccgggtggaggaggaattcgtcataggccacatcctgaaccatccggccggcatgaacgtgggagaagtggcgcgccatacggacattccggaatccctttaccccgttcccatcttcaagggaggccccgtggagcgcaaccagctcattttcgccgccttcgtccgtacggaggacaaattgcgcgtccagttccatctacaggaggaacaggccctggaatacattgaggatccccacgccatcctgcgcgcctacgtgggccacagcgcctggacgccctcccagttgcgccgggagctgaacgaccgcgcctggtacgtctcccccaccgtgccggacatctgcctggagccggactcctccaaggtatgggccatggccatgcggcgcctctcccccctgcaccacatcatgagccacgcgcccgcacagccttccctgaattgaaccatccatcatgagcatccaacagaatctggaacacattctctcccgcatccgctccgcggaactccgtgccgggcgtccggctgggtccgcccgcctcgtcgccgtcagcaaaacctttcctgcggatgacgtgaaggcgtgctacgatgcgggccagcgcattttcggagaaaacagggttcaggaggccctgggaaaaatccccgctcttcctccggatacggaatggcacctcatcggccccctgcagcgcaacaaggtgcgcaaggccctggaacatttcacgctgatccacgctgtggactccctgcgcctggcgcagttcatggacgccgtagcgcaggagacgggcaaacgcccccgcatcctgctggaagtgaacgtaggggatgaagacagcaaattcggcttttccccggagactctggaacgggaatggccggagctggccgcgctggaccaccttgaaatagccggcctcatgtgcatccctcccccggtggaaaatccggacgaagcgcgcccttatttccgccgcctccgggagctgaaggaaaccctgtccggcaaggggggagccccgctgagggagctttccatgggcatgagccatgactttgaaacggctgtggaggagggcgccaccctcgtccgcgtaggcaccgccattttcggcggccgctcctatgctccggccccgtgattttagttggacagaaggaaaagcggcgtgtacgtttgttccggaataacggaacggcccggacggagccttgatttcaacaccccatgctgacaggaggaaaaaacgtgattccgcatgcggtgcgggacgtagcggatgccgccgcggcattttccgcccgcattggtccggaccgtcattttgactcccaggaaaacgtggaggaagccctggcggaatgctgctctccgcagaacgtcaccgtgatcggcatgacgggttccggcaagtcttccacgctggatgccctggccggagaacggttctgttcccgcgtttccagtgaagccacactggtccgctggcagtacaggccccaccccgcgccccacacccatgaatgggtgctggaccttttttacccgtcggacgccctgctgaaccttgagttctgggacaccatcggcctggaacaagaggacgccccccggaagctgaagcacatcgtccccaaatcggacgccattcttgtggtcatttccgccagggacggcaaccagctccctttatgggactacctccggacgctggaggaacggctccattcccgcatggtgctcgtcatcacccacgcggagctgctatcctttgaccagctccagtccctgaaagaggaattgcgctccacctcccgcgaacgcctgggcgtgcagcttcccctgtaccccgtcacgaccgccggggagcaggctggggaaggcgtggaagcgctgagaacatgcgtgcaggaggtgctgaaacgcagcccgctgacggacaagcgcgtggaacgcctgctgctggctacggaccgcctgctggaagaacagggaaaggtgctcaatgaactgcaccgcctttccaagatggattccggcttcctgacttccattgaccgggagatagaccgcatccagctccagatggaggatgaaatgcccgcacggctcaaggcatacgcccagtacgtgcaggactgcgtgccgcggctggggaaaaaatcggcccggcagatggggcgcttcctttccatccggcgcacgatgatcctgcacaagcttcctcccgtcattgacgaatggttttatgagctggtcaagtccggcattgaggaacggcacgcgtattacaacaaggaattcctgaacatctgccagacgcactggaaccatgtgcgcccccgcgtgaaggaacagtgggactgcgacataggcgattttcccgccgcgcggctccaggcggacctggaggtgtacaaggagcgcctgggccgttccatttacatgcccctgaaggatttcggcatcaagccgtgcctcagcaagctgtttctggaccaggaggacgtgatgagaacggaaatcaagctgatgctcatcctggtgattctgggagccctgctggggtgcttcggagaacatgcggcggggtttgcctgcgtagccgcggccctggccgtctgggtgggcggcaacctggggctggcctggatgcagttccggctgtcgcgccagattgtagccgcggcggcggaaatgcacattgccgtggaatgcggcctgcggacgcccctgtatgaagccatggtcagcggcctttccgattaccgcaaactgtacgcggacatccgcggccaggtggccggcggcgtggaacatctccagcccctgctgaatgcccgctacgacctgttctataaactgaccgtgcagaaacaccggttccgcatctagcccctttccttttcgtccggagacgcggcttcctgttccctgccgcagaaacgcacccgctttccatcaagcatcactccgcgtccggcgtaatcaccatgtccacatgcctgtcatgggcttccatgggcaggtcgtccagaagctggcaggggaagcagactcccgccagggaaactcccgcagccggaccggccagcagggtatcataaaatccgccgccgtaccccagccgcttgccgtcccgcgtaaacgcggctcccggcagaacaatcaaatccatttctcccgcatgcagttccgggcaacccgggccgggttcgcgaatgtcccagcagcccgtcacaaactccccgtggtggcatacgcggtggaagctcagcgtccttccctcatgcaccagcgggaagtaccattcccggtccggcagcatgtccagcaggggcagcaaatccacttcccccggcctggcggcaaaaacagccacgcgccggaaattcttttcccgtaccagcgccgccacatggcggcagatggaacgggacatggcttcccgggcggcggcgtccaatccgcctatcctttcacgtatcatgcggcgcacttccctcttggaagccgccggaccgctcacggttccggattggggtgcttttccttccattccaacaggctctttaaaaatacgctttccaatgagttgcgcgggtgtccggcttccagccatgcggcgcggccgtcttccctcaccagctcctgcaactgttccagcagctccggggaggcatgctccagcaggatttcctgcttgtcggaatcccgtgtcagctcgttcatggaaccctccgcaatgagcagccctttaaagatgacgcccacccggtcgcaaacctcctgaacctgttccagcaggtgggagcacaggaaaacggttaggccgcgcgccttcaggttctcaataatgttccggatgtcgcgggaaccgagggggtctacgccggcggtcggttcgtccagcaccagcaggcgcggagactgaaccagagcctgcgccatgccgacgcgctggagcattcccttggaatagccgcccagccgcctgtccgccgcgtcggccagccccaccaggtccagcagttcacggactttctctttcagggatttgccgctcaggccgcacagcttgccgtaaaaggagacggtttccgcccctgtcaggaatttgtagaagtaggggttttccggcagaaagcctacctcctccttgctgtccggggacaggctggatttgccgaagatggcgcacgacccctccgtgggcctcaccagccccagcagggccttcatcagggtggacttgccggagccgttcgggccaatgaggccgtatacctctccctgccggatgctcatgtctatcccccgcacggcatgcaccacgggcttgccaagacctgtcttgaaggtcttgtgcaggttgacgatttcagcggcggcaggctggtccataagaacgcggtcaatgcttgatctgccccaggcggcgcagaagaatctggctcatgtctattcccttggagaacaggtccaccgggaagttttcattgggggagtggatgcgcgcatccggcaggcacatgcccagcatcagggcgtccgctcccagcacgcgcttcatttcctcaatgatcgggatgctgccgccctccctcaccagcacgggcttgcggccaaaggcctcttccagcgcctgctgggcagccaggccgaactcggaattcgggtcgcacacgtaggcgtttccgccgtggccccgcttgaatcccaccgtgacgcccctggggacatggctcttcacatgttcttccagcagcgtttcaatcttttccggctgctggccgggaaccaggcggcaggaaatcttggcaaaggcatggctgggaatgatcgtcttgcttccctctccctggtagccgcctccgatgccgttgatttccagcgtaggacgggcgaaaatgcattccgccccggtgaagcccgattccgtcaccacggtttccacgcccgtcagcttcgccagctcttcattgctcatgccgggcacggtggcccacatgctgcgctcccacgtggcgatgggttccacgccatcgtaaaaacctctcacggccacgcggccgtcctcgtcatggaaggaagtgattatttccgccagggccgcaatggggttggctaccgcgccgccgaacacgccggaatgaaggtccgcggaagggcccttcacgataatttccgccccggccaggccgcgcaggccataggaaaacgtcggtgtgtccggagcggccatcccggtatcggaaaccacaatcacgtcgcaggccagttcgtccctgtggtccttgatgaattgggaaagacttccgctgcccacttcctcctccccttccagcaggaagatcacgttcaccggaaggtggccgccgttctggcggagcaattcctccacgcccagaatatgggcgaacaactgccccttgttatccgtggcgccgcgggcgtaaatcttcccgtcccgcacttccggttcaaacgggtcggactcccacagctcaaccgggtccacgggctgcacatcataatggccgtaaatcagcacggttggcttgccttcctcccgcgggctgcgggccatcacaatgggatggaggcgcgtcttgtgggccgcggcttccagccccatgccggacagcttgtccaccagccagtccgcgcagtcgctcacgtcctgggcgtgctccttctgggcggaaatgctggggaatctcaacaaggttgccaattgatccagtctgttcatggcaccatcagaccacgcctgaggcttcaaatcaaccggtaaagtgtggcattccgcgccggaacgggccttttttcaaaaaaatgaggcttgcccgcgggtctgggaacaatatttgattgccctcgcgcgagatttgttcctttatataggattatgttcagcaaatccaaagtgaagaaagtggatttcgtcaccctgtccaaattttacggcaaatacaaggaagccctccaactggagctcatcaacagccccgccggcctcagccgccacatttgcgaacccgccctcaaccgccccgggctggcgatcgccggcttttactcctactttgccaacaagcgcatccaggtcttcggctccgcggagctggcctaccttcaaaaactgccggagggcatgcgcaaatcccgcatccagcgcatgttccggtgcgaggtgccgggcatcgtcttctcccgtgaccaggacccgccccaggaaatcgtggagctggcggatgaggccggcgtctgcgtcttccgcacgagcctggtgaccatgaaattcgtcaactccgccaccatcattctggaaaacgaattcgcggaaagcctcaccctgcacggctgcatggtggacgtgcgcggcgtgggcgtcctcatccgcggcaagagcggcgtgggcaagagtgaaacggccctgggcctgattgaacgcggggcggccctggtggcggacgacatggtgtacgtgcgcaacgtgggcggagaactggtggccagcgcgccggagatgagccgcggcttcatggaagtgcgcgggctgggcatcgtcaacatcaccaccctcttcggcctcaaatccatccgccacaacaagcggctggacctcatcgtcaccctcattcccgccaaggaccaggaagcgctggacaggctggggctggaaagggagggcctggacgttctcggggaaaaagtgctccatgtgcagctctccgtagcccccggcagggacatcgcccgcctggtggaagtggccgccatggactaccatctcaaggacatgggcatcgacatggccggggagttcaaccgccgcctcatgtcaaacttccagccgcctgaaaaccaggactgacaaaaaactcttggaaaaaaacttcaattagtgtacttaccgttctagcaaccgttatcaccccttacttcaaattccatggttaccaaggaactcaccatcatcaacaaactcggcattcacgcgcgtccggctgctcaattcgtcaaactggccagtaaatttgatgcagacattgtcgtggagaaggatggcgaggaagttgatggaaagagtattctgggcttgatgatgctggcggtaggccacggctccaagatcaccatcacggcggaaggaaaggatgagcaggaagcgttgaacgcgctggaagacctgatttcccgcaagtttgaagaagattgaacactccggctcacggccatatgagaccgggccatcaagcccgcagatgattcaggaacccatttccacggaagaaacctggcttcagggcattcccgtttcccccggcatcgccctgggcaagatcaaaattcagatcagcggttccaaggaacccgtggcgtatgaaatttccccggaggaggtggatgccgaattggtgcgcttccaccaggcgctgcaaaccaccgcggatcagatccggacgctgcgtgagcgcatgatccagatatccggggaaaaggacgcctccatctttgacgcccacatccttcttcttcaggacaaggtcatcctccagcaggttcagacggagctgctcaagcgcctccagaacgtggagcacatcttttatgtggtcatgcagaactacatggaagtcctgcgccgcgtggacgatccctacctgcgcgccaagaccgcggacatggaggacgtcatgcagcgggtcatcaacaacctccgcagcacggaacccctggaagacgaggaagaagcggaggaagcccaggtgctggtggcctatgacctgaccccttccgacacggcggccatggacgccagcctgattcacggctttgccacggaaataggctcctccgtttcccacaccgccatcctcgcccgctccatgggcattcccgccgtggtggggctggaccaggccctcctgcgggtggaaagccacgcccccgccatcctggacggctacaagggagtgctcatcctgaagcccacgcaggagacggtggagtactacaaccgcctccaggtggaaaaggaaaaggcctacaaggcgctggaagcgctgcgggacctgcctaccatcaccagggacggccgcaacatccgcctttccgtcaacgtggaattcccccatgaatactccggcatcaaggaggtgggggcggaaggcgtgggactcttccgcacggaattcttcctgctgggcaatccagccggcatgccggacgaggaggaacagacacgctactacaagaagctggcggaaggctgcgcgccccacggcgtcatcttccgcacgctggactccggcggcgacaagctgccgtgcgaacggctctgcacgccggaacctaatcccttcctgggctggcgcggcatccgcgtctccctcagccgtccggagctcttcaagcagcagctccgcgccattctccgcgcctgcgcggacacgcccggctgcggcatcatgttcccgatgatctccggctatacggaggtggtcaccgccaagcacatccttcaggaatgccgggaggaactggaaaagaaaaacgttccctacgcgcgggacctgaaggtgggcatcatgattgaagtgcccagcgccgccatcatgacggacgtgctcgcccgggaggtggacttcttctccgtaggcacgaacgacctcacgcagtacaccatcgccgtggacagggtcaacaaccgcgtcgccaacatgttccgccccacgcaccccgccgtggtgcgcatcatcggcatgacgatcactgccggagaacgggaaaacgtccccacggccatctgcggggaaatggcgggggacatcaccctgcttcccctgctgatcgggctgggcgccacctccatgtccgtgggcgtgcatctggtccccatcatccggtacgccatccgcaacctggactacggccagtgccgggacatggcgcagaaggcgcttcaggcgcccaacagcaggaccatcgtggacctgagcacggctctggcacggaaatcctatccggccctgtttgaataaggccttcccttccggcgcatgccgtaccggaaaaaacggctcttatctccggcaaactgccgcgggaacacgaatccttgacagaatagcccgtttcatgcgttatatgagtactggtctttttatcatgaaaactttcagcattgcattttctctcatcccgttcctgctgggaagcgccctgcccgcttccgcagcaccctcaaacacgccccgcgcggcagcccagaaacgccccaacatcatccttttcctggtggacgacatgggctggcaggatacatccctgcccttctggagggaagcggacggcacgcccaagcccaccttcctgaacaagcgctaccgcacgcccaacatggaggccctgggcaagcagggcatggtcttcacgaacgcctatgcgcagcccatctgttcccccagccggtgcagcctcatctccggcatgaactccgcccggcaccgcgtcaccaactggacgctcctgcgggaccagaccacggatgccggccacaaggcgctcaaagctcctgcggactggagcatcaacggcgtgcagccactgggcaccaaatcttccggcaccacccttctccccctgacggaagagaaaatccagtacaagatggaaaagccctttaccccggtgctggggctgcccgccctgctcaaaaaacagggctataccaccatccactgcgggaaggcccactttggctccaaaaataccccgggggccaatcccaaactcttcggctttgactacaacatcgccggcacggaaatcggcggcccggcggactaccggggctcccagaaatacggcacggggaacttccacgtccgcggcctggatgagaacaactattatgaaaacgacgtcttcctgacagaggccctgacgcaggaggtgctgaaacgcctggacgccatcaggaacaaccccaaggaggcggacaagcccttctacctgtacatgtcccattacgccatccacgcccccttcgacatgcgcggctatgacaagcggtttgcggaagactactccaaccccaacgacggccacaactggtccgacaacgaaaaacgctactccgccctgatccaggggatggacaagagcctgggcgacatccggcagtacctggaaaagaacaatctggataaaaacaccgtcatcatcttcatggcggacaacggcggcctcgccatcagcgggcgcatgggcaacaaggaatccaactacccgctgagcttcggcaagggctccaaccgggaaggcggcatccgggagccgatgatcgtttactggcccggagtcaccaagccggaaagcgtctgcaccactcccgtcatcattgaagacttcttcccgaccattctggaaatggcgggagccaaaaaaatccaggctccgcaggtcgtggatggcaaaagcttcgtcaccctgctgaagggcggcaaaatgaaccccaaccgccccctgctcttccatacgcccaacgtctggggggaggggaacggcaacaactcgctttattcccccagcacggccatgcgccagggggactggaagctgatttactggcaccccacccagaagtttgaactcttcaacatcaaggaagacatcagcgaggagcacaacctggcggaacggcatccggaccgcgtgaaagccatggcaaaaaccatgaccgccctgctcaaggaccgcaaggcccagatgcccacctacaagaaagacaaccccgccggagcccgggaaggctcccccgtgccgtggccggaccaggcggcggccaggctgtaaaggcatctccacccctccccggaaagccgcattattcccttttcttttaaggaaacagggagtatggtgcggctttcctgtttttattccctttctccattctctttacaatatcatgaaaaaccttctttccatcgaacagcttaccggagacgaaatcaaggacctgctcgcgctgggccacaagctcaaggcggaacgcggccatcacgaacgcctgcccctgaaaggccagacctgggcgcttattttctccaaatcctccacccgcacccgcgtttcctttgaagtgggcatcagcgaactgggcggacgccccatgttcctttccgtccatgacatccagctcgggcgcggagaacccatcaaggacacggcccgcgtgctgggccgcatgatccacggggccgccatccggacttacggccagcaggaagtggaggaattcgccggcttctccggcattcccaccatcaatgccctgacggacgaggaacacccctgccagatcctggcggacctgctcaccattgaggaaatctacggccccggctcctggaaggacatgaagatcgcctttgtgggggacggggacaacaacatgtcccgctcctggatgtgggcggccaagaggctgggcttcaccctcgccatcggcgccccgaccaactacctgccgctggaggacttccgcaggcacctggactgcgagaacgtcatcttcaccacggaccccgtggaagccgtcagggggcctccgtcatcaacacggacgtctggctctccatgggccaggaagcggaaggcctgtccaaggaaaaacacttctacccctaccaggtgaacagggagctgctggaacacgccgcccccaaccactccgccttccactgcctgcccgcctaccgcggcaaggaaatcacggaagacgtgctggaacacttcgcccccgtcatcttccgtgaagcggaaaacagggtccacgcccagaaagccgttctcgccacgctggcggacgccaaccgggcataaccggcctttcccaccaaatccgagccatgaactacgaagaacgcctgcaagacctgctggatgaactggacctgttccaggactggacggaacgctacgaatacatcatcagcctgggcaagaagcttccaaagctggacgaagcccacaagacggaggactccctcatcaagggctgccagtcccgcgtgtggctgtacacggagccggacaagggagtgctgaagctctacgcggacagcgactccctcatcaccaagggcctcattgccgtcttcatccggctgctctccggccttcccccggaagaaatcctgaaagcggacatgtccaagctggacaggaccggcctgaaggaccatctggcgcccaccagggcgaacgccctcaactccatggccgcccagatcaagcaggccgccatgaacatggtggaacaccattaatttttccggtacgatgacccacggccttctcccgcatctcttccttctctccgcagcctgctgcgcgtgcctctcatgcagcagctcttccagggacatcactatccgcagcgtcccttccggggccagcctgcgcgtgaacggagactatgcggggcaggcacccgtcacgctctctctgaacaggcacaagcccgtgcacgtggcggcggacaagcccggcttcctttccacggaaaaaaccttttatccggagatgaccacgcagggggccatcctgtggggccgcaacaacgaaaagtcaaaagacttcaagacggacaccctgaccattcgcctgaaaaaggcggactccggagcgccgcccctgagggaactgcccgcacagtggtaacggcctcccggccatgcctctccccgggcacggctccattccttccctgacgcgcacggcacgtgccgcgcgccccctttgggtcctctccgcgtccggccttgatacgccggtttttcgcggtaatggctatccttcctcctgccccaggtgccggaccatgacggcggaacccacccttttcaggaccagggccgtacgcggcagcaggtacagggaaagattcccgtcttcatccgtaaaatgcggcatggaatcgtcctgccttccaaagccgccgaagcgggcgccgtccgtatccagcacgaccctccattcccccttctggggagcgggcagcacgtaatccatgatcgccctgtctccggaccagttgaacacaaacagcaggccgccgcggtggaacgccatgacctggttgttttcgtcaatattcagcgggaacggcggcggattgttcagcagccgtgcgtccagggccaggcggaccatggcctggtcaaaggcattcaggaacttgaacctgagggacggattatccaccagggaccactggcggcggcagtgctcgtaagaccagccgttgccttcacgcggaaaatcaatccattccggatgcccgaactcgttgcccatgaaattcagccagccttcccccccggtagccagcgtcaccaggcggatcatcttgtgcagcgccatgccgcggtcaacaacaaggctctgctggtccacggccatcttccagtacatctccgcatccatcaggcggaacgccagggtcttgtcccccaccagggcttggtcatggctctcgcagtaagccacgtgcggctcgccgtaacgcctgttggtcagcgtatgccacatgtcgcccatgctccattcctcgtccttcttctccttgagcagcttgatccagtaatcgggaatgcccatggccagccgatgggaaaagcccaggcccccttcatccaccgggcggcacagccccggcatgccggacatgtcctccgcaatcgcgacggcgcccggtcttacccgctggatcagcgtggaggccagctgcaaataagccacggcatccaggtccacggacggcccgaagtacgcgcccaaatccccgaacggctcgtggccccggtggaaatacagcatggacgtcacgccgtcaaaacggaacccgtcaaagcggaactcctccagccaccagcggacattggacagcaggaactcaatcacctcgtcccgcccatagtcaaagcagcaggaatcccagtccggatgatggccgcgctccccgggcaggaaatacatgccgccggaaccgtcaaaattattcagaccttccgcctcattcttcacggcatgggaatgcaccacatccagcagcacggcgatgttcaggccgtgcgcctggtcaatcaggtacttcagatcctccggcgtgccgaaacgggaggaaggagcgaaaaaggaggaaacgtgatagccgaaggagccataatagggatgctcctggacggccatcaactggacggtattgtagcccagtttggaaatgcgggggagaacttcatccgcaaactcccggtacgtatgcacgcgctgctcttccccgcccatgcccacatgcgcctcgtaaacgaacggcacctctatccgggcagggtcaaagccgttgttcctccattcataggggtgctccggcatccatatctcccctgcaaaatcataagtggcggggtcctgcacggccctggtgatccacgcgggaatacggtccttccccgtgccgtccgcgccgatcacgtgcaccttcaccttctgcccgtgggccagcgcgtcaggcggcagcgttatctcccacacgccgcgctcattccgcaccagcgggtggctctcccggtcccagccgttgaaatcccccgccaggaacagtccgcgggcggcgggcgcccattcccggtacgtccacgcccccgtctccggatcacggttaaagccgtaatagcggtacccctgcgcatacccctccagagaaccggaacgctggctgatccttttcattttcaggtcaaacaaacgctggcggtcgcgtatctggcgggaatacggctggagccagccgtccgccatcaccaaaccgggaatcgggggtcttctcattatccgatgatactccgccccaatcagcagggtcaaggagaaagacgttcttccggccctccccacgcatggcctgcgtccgcagcgtcaggaacacctcctttccggagaatacggcgcggcggaacgccggaaccacgcacctcctcccatgcgcccctagtcacattccggcaaacgcccggtatcccgcatgtacagcatcctgagcagcacttccttggaaatccggttcaggtcaaaatgcacaggcggagaatcaggaaggacaccccagtctccatattgcccgtataaaaccatttcaggcacccggggcccgggaaaagtctttccttcaaacaggacgctggacaggggaaacatccattcatgacggaaggaatggcggcacggtccggcaaagggaatttcaaaacccaggcagacgtttccatcctccacaggatccttcccttccatcaccaactcatccctgatcctcattttatcctcataagaacacagcgtttggtaacggcgcgacgtgttagcttcataatcaatcagcttagaagccttgtaattacgcagcagccattcccgctcctccggatcatccggagaccaggagccgggagcaacatcgtacgggaaaatgtccacattgcacaaggtgcccggcagcccaatctggataaacggctccaggctgacggaaaagccgcgggaaccaaacaactcggcagcacccgctctcagtcgttcatagtcgcttcgcagcatggaaatatccagatcatcatcccagggaataaaccccttatgcctgaccgcccccagaagggtcccgaaatccagccagtactggtaaccgttttcttcaagaatactgcccacttccttctaaaaaaatgccatggcctgctgcacaaccctcagcacgccggacgccgccggaacttcctccgcccggacggtggacttcaccagctttctcatctgtgcatgctcattttccttccccaccctgaaccgggcgcagggaatgccgaacaacctgatggtacgcttctttctatccgtgattgaagaaagcaccgtcaggccgcagcagcgtacttccgtcacccacagatgtttatttttcattagctttccggttcttccggcagtgatgaacgaaggcaatctcatggtgggcaaatctaggcagtgaatacgggaaaatatcaatctttccgtaagcgaacaacgggggagtcctgaaacggaccttatccaccggataccataagtcaatgaaaaacaatgcggctttttaatgaaaaacaaccatttccgtatattaaaaccattttctccaagatgcagcttttgaaaaaaatcctcaattctcttttccccaacttccatagcatgcggattgatcatccgttaaacggatcgctatctccatttgaagttaaatcaatgaaaagcgggaaaatagggaaggaaaatgaattacgtacttttcctttttcaccaatgtactttccattaacatgtttttgcagaaatttttactttgacggcggatgatcaatccgttaaacattgttcttggttctttttaagttctgaagacaaattagagtatttatgcaggcaatcattttagcggccggaatgggaaaaagactggggcatctcacccaggacaacaccaaatgcatgattcaagtgaacggggtaacgctgattgagcgaatgctgaggcaactggacaacctttccccttccctggagaaaatcgtcgtcgtcacgggatacaagggagcaaaacttaaatccttcatctctcttctggacatttccacgcccgtggaatacgtggacaatcccctttatgccgccaccaataacatttattccctttacctggccaaggagcacctgcttcaggacgatacgctgctctttgaatccgacctgatttttgaagactccgtcattgacgccctgctccaccatccctaccccagcctggccctcgtcgccaaatttgaaagctggatggacggcactgtcgtcacgctggatgaagacgacaacatcaagcaattcattcccggcagcaaattctcctataagaaaaaaacggaatacttcaagaccgtcaacatttacaaattcaacagggatttctcccgtacccactacgtccccttcctcaccgcttacagcaaagccctgggcaacaacgaatattacgagcaggtgctgcgggtcatcgccctgctggacaaaccggaaatcaaggccctgcgtctcggcagcgaagcatggtatgaaatagacgacatccaggatctggacatagcggcttccatgttcacaccagaccgggaggaacacctgcgcctgatggagtcccggtacggcggctactggcgctacccacgcatcagggatttctgctacctggtcaatccatacttccccaacaagcgcctcatgtccgaactcaaggcgaactttgagcacctggtgcgggaatacccgtccggcatgagggtcaacagcctgctggccgcaaaatacttcggcgtcagccaggaatacatctgcatcggcaatggcgcggcggaactcatcaaggcgctcatgtcccgcatggaagggaaaatgggcgtcgtctaccccacctttgaggaatatcccaaccgggcggccccggatatggtggtgcccttccatcccgcttcctggaatttcagctacacggcggacgacctgatggaattcttttccggcaaggacatcagcaccctgctccttgtcaatccgggcaatccttccggcttcttcctcccgaaggccgacgtgctgcgcctctgcctgtggacgaaggagcgcggcattcgcctgatcgtggatgaatcctttgtggatttctctgaaggcatgccggacaacacgttgctccgggacaccctccttgaggagtacccccatttggcggtggttaaaagcatttcaaagtcctacggcgttccaggcctccgcctgggggttctggcctctgcagacaaaaagctgattgcatggataaaaaaggacgtttccatctggaacattaattccattgccgaattttacatgcagatcttcgggaaatatgaacaatcctacgtgcgcgcatgccgccggttcatggaggaaagagaccgcttcatgcaggaactctcccgcgttcccttcctgaacgtcctcccctcccaggccaactacttcatgtgcgaggtaatgccgcccatgaaagcccgtaccctcacgggcctcctgttgaaaaaccactccatcctgatcaaggattgcagccggaaaaagggctttgagggtagggaattcatccgcatcgccgtcaggaacaaggcagataacgacgccctggtacgcgccatgcacgagatatgttcaatgcgttcaaactagtcattaacacccttttcccaaacgccgcttttaccttactcctcctactatgctgacaattcctcacgaaattatttcctccctcaatatttctcctcggcaggcactccaatgggtaaaagagtccttccgtatcaaggatgaagaatctgtcttccttccccataaaataagcatcgcctttgaagaaggaaaattcatgaatacgatgccctgcatcgtccccggcctgaacgccatgggggtaaaaattgtaacacgttatccggaacgtaccaaaaccattaatggggaaatactcctttatgattatcataccggagagcttctggctcttatggacgccttttgggtcacgaacgcccgtaccggagcagtggccgccctcgcccttcaaacattcgccagacaggatttccagacaatttccctgatggggttgggaaatacggcccgcgccaccatggcatgtattctggcattatatcctgagaaaaactttacggtgcgtcttctttcctacaaaacgcatgtttcccaattcattgaagaattccaatgccatagcaacgtccgttttgaagaagtggaaaacatcaatagtctcattgatggaacagacgccgttatttcctgcattactaatgcggagggcctccttgccgaaaatagctgtttcaaaccaggcattactgttatccccgtacatacaaaggggttccagaattgtgatttgtttttcgacaaggtatttgccgatgatcgtgaccatgttaagaatttccggcactttgagtgctttcgtcaatttggggaaatagctccggtgctggccggaaaagcagcgggaagaacttccccggaagaacgcatcctcagctataatatcgggctgggactccacgatatcgtcttcgccaagcacatttatgaccgcctgatcaatattgaggagcagaaggaaaaatccccctcctttcacttccggcaaacggcatgcctgtcctgatcagctgatttcatcaacatattcccctcgcctgaagcgggaggtaacgtcagccatgaagatggaatccccacgggtcaaaagacggttgtcatgacggcagccgtgaatcaggcgcaaaaacgcggccagctcatagcgaaggccgtcgccctcaaacctgataaaatatttcctgttctgccgggggtcttcaaaacgcacctcaaacatctccgtcttccaccacggggagggcacgtaaatatagccgcgcgttcccgtgacgcacaggtccccctcccgcttggctccgatggcgaccgtggcggaggctgccgcattgggataaaggaaatccgcccgcgtaaaaaggtccacgcccgtttccggcttcctgcaagtcgtgaagcggatgcggcggctttccgtccccagcagctttccgatgacgaaaacgggataagcccccagctccgtccacgcccccccggcctgcatgggatcgaactccctgcttgaatcatcctcaatcaatttggtgaacgcggcgtccaccgccttgatggaaccgataactccgctttccgccacgcctatcaactgctggaaagccgggaaaaaggccgttttcagcgcttccagtaaaacgcatcccctctccgcggccagcaggaacagctcttccacctcttcccgggaaagggcaagcggcttttcgcacagcacatgctttcctttcaggagggctcttttgaccagttcataatgtagatgatgcggaacggccacgtaaacggcatggaccttgtccaggaaccgttcatactccgtgtaatattccagcagttcatacgattccgcaaaccggcgcaccttctcctcgtcgcgtccgtaaacggccgttatttcaatgccgctgacgtacttggactcctggagaaaacggcccgctatgcgcccgtggccggcaattcccatgtggacaatgaaattccgggcggaacggaggtcggttgaagaaacgcccttcgtgcgctccaggtaaaccacctcgcaatgttcgcgcagataatcgaacttgcccgtccagtcggaaccgatcacgaaaatatccgccccatacttctggatgtcgtgcagcttctgcccttccagctcctccgtgataataaggtccgccaatccggtcttccggacattttccacgcgttcctccaggctttccagcacattcagcttgccccggctctggtcgtagctgtctgtggtcacgccgacgatgaggcggtcccccagcgcccgggctcttttcagaagattgacgtgccccgtatgaagcaggtcgaaagtgccgtaggtgataaccgttttcatgactgggacatgtcaatctgctttccgtagacgtcaatgaaacggttcaccgccgtctcaaaggggacatgttccatcatgcgctttacggaagggtgcttgaactggatgcggtccggataggacaggtaatcgccataaaaaaattgcaggtactggcgcgcatggttgggcacggagaatttcatcccctcaaactccatggatcccaggggaaagaacgtctcatagggcagatgagtgtttttagtaaatgtgatggccggggaaaggaaaattccgggggtgtcctcctccgccgccgggtccttgccttccagaatctcccggcggattttctgctggatctggtcatcggtcatgttcatccggccatccaccagaaccacgtcttttttaaacgcagtaagccgcctgtccaggctgccgtgctgttccggggacacgaggctttccgaataaaaatgataagggtatacgtcaatgttgagaggagtgccctcataccctatttgcaggaaggcatgccttttccaggtaaatccctcctcccgcggaaagagggagggcagcagttccagaaggcggtcgtactccggcctcatcatgcttgcgtccagatcatcgtcccacggaataaagcccctgtgccgcaccgcgcccagcaacgttccgtaatccagccagtaccggaggccgttttcccggcacttccgcgcaaaaagagccagcaaaacggtattgccttcctgaagcagcctcagcttgcccgtagccggaggaacctgggaaacgggatggttgtaaatgagaagattgcggatatcttccagctttgacgccaaagattcgtttcttcttctcctgaaaccattcataaaccgattgatgattttccgcccataataagggaacttacagagaaccatatattttatatggtttaattccatcatattcaatcagttttaaaaaattcaaaccatccgccgaaatcgaacggcctttaatcattgaagagaaatcagtataatgcaacctttcagctatgcaacgtttattatattgattttcatcaataaaaagcttctttcactctggctagaagcttgaaaatacaacttttacctgaaaaaaaaaaaaagagggaagctttcctgaaattctttttccttttttctggaacgcattaaaaaattactggagcaaccgctccgtgaaaaataacaggccgcatgaacaaagacactccgccagccgggaaaaaccatgcgctgccggtcagctacacagccctaaccaggcaaactttccatagcaaatgccgctacttcagcacgggtttatttacagcttgtccagggcggaacggccgtaagccgtgttgggatacctgtccgcggcttcctcccagtatttccgggccttgtccggattgttgagctgggaatcgtaaatcactcctatcttgtacaggaacagcgcccggtcctccttgcgccatcttctggactccaggccttcctgaaggacttcaacggaatccgcataccggcgcatatcgttcagcaggctggattccatgagccaggaacgcaccagccccgaattttccttccggtagcgctccagcagttccagggctccctgcggatccccggaattcagcatgcgccgggcggcgtccaccagcacttcctcatccgtggtgatgttggaggaatacagcgtcttggtcaccagatcgcccatcacgggcagcaggtacttgatcacgagccacacttcaaaggcaatcaccggaatcaggacgaccagggattgcagcggggaaaggggaatggcctgcgccaggaacgcaaagaggcccaggggaagcagcaccagcagcagccgtataaacgtgcgccgggccagcagcagaatcattttcaacatggcgggattgttcaagggagttagaggcagtccgggcggctccggagaaaaaggaacgcctccgcggccccgcccggaggaaagggccgcggaggcttccgtttaaaagcggtaaacggcttccacgcccacgcggatgcggaagtcctcaatcgtgctcatgccggtgtagcggcggatttcggaacgggtgtttccggcccagtccagctggatgaagggaatgacgcggaacccgcggctggcatccacgcccgttacgcgcacgggagccgccagcttgatgttcacctggtcaaatccggccacgccggagccccagtagctggaagaatagccggttccggcgctcaattccaggtccaccttctcatgaatcaggccgctccagcgcttgcccgcgttcaggtcgatacgccagccaatcatgccgtaaaagccgtactgcacgtccagggagccaaaatagccgtggcccggatcgtcatacgccaggcctgccgtcacggactgggccacggaatggggggccttccccatgtacttgctcaaatagcccggcaggccgccgtaattgaattcgtaccccccccggaaagacaggttggggaacagctccttgacggccttccagttggcgtcaaaggcatccttgtcgctcagcaggccgtcgcagaaggccatgtattccgcgccgatttcctgcttccagtcccgggccaggttgagattcagctcaccgccgatgttgaacacgccgctgcggttcagcagggaggatgccaccacgtccttgtaggcataccgggaatcataaccgatgtgggccgcgccgctgaccgtatcattgtaggaacttgcgggacgggggtcataaccatatccgtcataggcgccggcggaaaccgcggccagggctgaggccgccatgaacagggctgttgctttcatagtaagcttatcttaatcatttcaacccctccaacgcaagcagaatcccggaacggcacggagaaacggaccttggcggcaacagcgggaaaatcccttgaaaaaagacagggtctttcttgtaaagaatccctttcctcctatgatggggcagtgatggactggaacgctgatttgtacgaaaacaagcatgattttgtcgcggaatatggcagggacctgctctccaacgtgccggaaaaccccggccaggccattctggacctgggctgcggaaccggtacgctgacgcacgccctgctggaaaaatcgacctccgtcgtcgggctggacgcctccccggaaatgattggaaaggcacggcagctttatcccggcatggacttccgcgtgctggacgcctgcctcatgccctggaacaactggtttgacgtcattttttccaatgccgccttccattggataccggaccacggggctcttttgaaagccgtctcccgcgccttgaaaccgcagggaaaactgatctgcgaatttggggcccaccgcaacatcctccgcatcagggaggccttccggcccagcctggagcggatgaacctcccgtacaagacacgtttttacttccccaccgtggaagaataccgcagcatgctggaacaggcaggactgcgcccggaagtggtgatggactttgaccgccccacgccgctgaaggacgggccggacggcttgcgcaactgggcgcgccagttcttctgggcggacctgaagtgcctccacgaaaaacggcgcgtccggattttcgaggaaatggaaaaggccctgcgggacgagctgtgggacggcacccaatgggtggcggactaccggcgcatccgggtgatcgcttccaaataagccgaaggcccccacaggggaaaaggcgcgcgggcgtgccggatacgctgataatgcttgagcctccaacgggcattttgtacaaaagccgccaatgagtatgttcactccttttgaagaaaagatggaatccgccggcgttccggccgcagccgtcaaagctttctcccgctgttacgaagctctcgtctccaaccactccggcatgattccggaaacggacatccagcccgccgaccaggtggtggactggcaggacatcacggcctccacccccgcggcggacaagggcctgatctcccagtgcgtgtgcatcaagctcaacggcggcctcggcacgagcatgggactccagaaggcgaaaagcctgctgaaggtaaagggtgaagacacgttcctggacttgatcgtccggcaggtgaagcacctgcgctccatctccggcacgcccgtgcgccttctgctgatgaactccttctccaccagcgcggatacgctggcctacctggaaaaatacgcgtctgacggctttgcggaccccgcccaggtggagctgatgcagaaccgcgttcccaaaatcctggtggacgggctcgccccggccagttgcccggaacagccggaactggaatggtgcccgcccggccacggtgacctgtacccggccctgctgggttccggctggctggaccgcctgctggcggacggcgtcaaatacgccttcgtctccaactccgacaatctgggcgcacagcttgacatgaacttcctgcgctggtttgcggagagcggcgcccccttcgtcatggaagtcacccgccgcacggaggcggacaagaaaggcggccacctggccgtcaggaaggcggacggccacttgatcctgcgggaagttgcccagtgcccggatgcggacattcccggattccagaacatctccaagcaccgctatttcaataccaacacgctctggatacgcctggacgccctcaaggaaatcctggacgccaacggcggcgtgctccctctgcccatgatccggaacagcaagacgctcaacccccgcgacccggaatccgccccggtgtaccagctggaaacggccatgggcgcgggcatcgagtgcttccccggcgcaagggccgtcaacgttccgcgttcccggttcttccccgtcaagaccacgtccgacctgctcctgctgcgttcggacgccatcgccgtggatgaagacggcaaggtggccctggctccggaacgggaaggaaaaactcccgttgtggacctggactccaagctgtacaagctggtggactccctggacagcctgggcctgccttccctgatcgggctggacaagctgaccctgcgcggccgcttccacttccaggacggagccgttctccagggcacgctgctgatggaaaacgattccgaagaaacgaaggaaatcctcccgggcgtttatgccggagcctgaactccattcttccgcctccgctccccgcccggtcaaagccgggctgggcgtggaggacatccggcacattcccgcccgggaaagggagctgcgcttcacccgcaaccgcgcgggctccgtcctgctggcggcgggattcctgctgatcgccaccgccgccttcctccagctcacgggttacgatacaatcaccccgtacctgcccgcccccctgtgggccatgcaggctgcggcgcttgttcccgccgtcctctgcctgattgcggggagccgctgcctgaagcacgcggccgtcatcgtcaccccggtaggcgtggaaatcctgcccttcctgcgggcgcgccgcgccatgcaatggtgcttctggcagcagatacgttctgcggaccggaaaggcggacgcctgaacctccgcctgacggacggctcaaccgtcgcggtcagcctgcgctccatgacagccgccagccgggaaatgctggtccatgcggtccggcagcgcgtcaacaccctgcaatgctccggttatggtaaggcctgaaaaactggccgctctccaggagcggatggaagccctgggcatccgtgaacaggatctggaggaaagctttgtccgcggaagcgggcgcggcggccagaaggtgaataaaaccaacaactgcgtttatctcaagcacatccccacgggaatcgccgtcaaatgccacgtggacagatcccgcgagctcaaccgctttctggcgcgcagggaactgtgcgacgcggtggaacaaatgcaaacgggccgatgcgccgcgagagcccgcgtcatccagcgcatgcgccggcagaaggaccgtagaagacgcaggcgttccagtcctccggctccctctccggacaacgaataacggctccaaaagccgctaggaacgcgggaaaacctcccggtacttctccttcagcatggcgaatacattgtgggggacatagcggctcacctggctttcccagccttccgggccaatcagccccttgatcatgctggaggacagttccgccgtatcccgcggaggcatcaggaacaccgtgcagaccttgggagccatgtccgcattaatatggcgcatcacgcgttcatattcataatcctgcgtggaacggatgccgcgcagcatgaacgtggccccgtgttcgttggcaaaatccaccagaaagcggttgtggaactcggcaatgcgcacgtccggcatgtcggaaagcgccacccgcagcatggtcatgcgttcctcatgggaaaacgtgtagtgcttgtccggattgtcgcctatggccacaatcagctcatcaaacatcctcgccccctgcttgatcatccataagtgaccattggtcagagggtcaaaactaccggcatacacggcgatgcgcttcattcgtgccatgctatacgccctcctgcggaaaatacaatccttttccatgcggcggacccgccctctccattcaggcccgctcttttccggacatccctgcttgacactcctgcaataacggctaaacattaacggacagcgcctcacttcccgcgtgcgggcggctgttccgcaactatccgacctttctcccatgacagaaccttcctcttcctttccggagcgtccatcccttccgccttcctgccccacctccgtccgcagagatccgcagtccctgctttccccttcctggtggaggcatgggcacatcccgctgcttgtcctgattgccagcggctttgccgcggatttcatgttcggtacattggagggcctgggcatcggtactgcgctgggccttctgctgtacacggcggcctttctggcactgagaacggacctcagccggaaggagcaggtgttccttgttttcatggccgtgctgaacgctgctgcggcaggcgccaacctaacttcctttacccagttcaatctgctcatcggcctggggcttcccgtggtgataacgttcctgccgcggaaagagggcaacagctttgaccctgccaaacggtacgtcacctggtggggctataaatttttccgggtgacccaggcaaaagaggcggccgcaaacgtcctggggaaaattccgcttgcaggcagcgtcgccatcggagtcattctgttcctggtcttcctgtccatctttgcggacgggaaccctgtggtcgccgccgtcagaacagccatgaacaaatggttctggagctattgctcctggctggttccggatatgggaacggtagcggacatcctcctgtggtgcctgggagccctggcattcggcattgcagccatgccgcgctcccgctcttccttcccggaacaacaccccgtgcgtccgggcagcccctggctcccgcacctccccgccgtttccctgctgttcatcaacctggcttttctggtcaacaacggcacggacgtagcgtttttatggcggggaagcgttcctgacggcatctcccagaccgcctatctgcacgacggggcggactccatcatgctggcggcctttctttccgccctggtgctgctggtcctgttccgtccggaaggctccgtgcgggcgtcaaaaacgggaatcgtcctgggcttcatcctggcggcgcagacgggactgctcgccgccagcgtgggcatgaggctgtatttccagataaaagatttcggcttctctcccaaccgcgtcacggccggcatctatttgctgatgggagcctgcttcctgtaccttctcttccgctacatggccggccatggaaactggctgcgttatggaaaactctgcggcgccatagcccttgttttcctggccctgaccgggctccgcagtccgtcccaactgagcggcgacctgaacctgatgacgatggacagacagtcggactggtatttcagcgatggagacctgccgcgctttgaactccgggacaacatccccttcgccatggccgtctaccgccggctgggaggggatacggaagccggagccaacgtttacgccatgacccgggaagccctccatgccgaaagccgcatttggaactggcgttcccgcaacctgcggaaatggagacgggaccggcagaggatgcagttccggcagcttcccgaacccacggcacaagccacctacggcacggatgcgtggcgtccttcctcccggcccactggaatgaggcctaactgacggaggggccggttcctgcggcgcggggaagattttcatccccccggcttgtcaaggagccgtattttttgcatcatgcttctccgttatgcagaaacgacgcgtcgtcatcctgggttccaccggttccatcggaaccagcgccctgaaagtcgcccgggacattccggacagaatggaaatcgtggggctggccgccggaaccagcgtggaggccctggcccgccaggcgagcgaattcaacgtccgcaacgtatgcatttttgacccgtccggggcggacaagctggcgcgcgcccttcccggcgcccaggtggaaacgggagaggaaggcctgtgccgcctggcgcagcttccggaggcggacatggtgctgatctccatcgtggggactgccggcctcaagcccgcactggccgccattgaagcaggcaaggacctcgccatcgccagcaaggaaattctggtcatggccggccagattgtcatggaaaaggcgcgccaagcaggtgtgcaggtgcttccggtggacagcgaacataacgccatcttccagtgcctgaacggcaaccacggcggaccggatgccgtttcccgcctgattctgacggcgtccggcggccccttccgcacctggaagaaggaagacctggagcacgtcacgctggaacaggccctcaagcaccccacctggagcatgggccggaaaatcaccatagactccgccaccctgttcaacaaggggctggaaatgattgaggcccgctggctgtttgatgttcccatggaaaaggtggacgtcatcgttcacccgcagagcatcgtgcattccatggtggaataccgggacggcacggtgctggcccagatgagcagctcggacatgtgcttccccatccagtacgccgtcacgtggccggaccgcgttcccaactccctcaggcagctcaactttgcggagataggccagctggtgttcgaggcgccccgtccggacgccttcccagccctggacctggcgcgcagggccggcgccagcagcagcaccctggccgccgtctacaacgccgccaatgaagtggcggtggacgccttcattcagggaaaactcaccttccccggcatctggaaactggtggaagccgtcatgaacgaccacaccccggcagatccccgcggagagctggcccccatcctggaagcggaccagtgggccaggcgacgcgcggcggaactgattccttccctttcccgcccttcctgacgccatgaccgcccggactcccgccggagcgcccccccgggcggcgcgtatcaccatcctggacatcctccgggcgctggccctgctgggcatcgtcatcgtccacgcgcacgaccacttcaacctgtacctccccatgcccccggcggagggatggcaggccgcggccaacagcgcggcggactgggcctacgaacaccttttcgtcagcaaatccttccttctcttctccttcctgttcggcctcagcttcttcatccagctggacaggcaggaacagaaaggcatcgacttccggaagcgcttcatgtggcggctggcgctcctgttcctgcttgggttggcgcacacccttttttatgacggggacatcctcaccatcttcggcgtgctgggttttgccctggtagccctgtacaaacgcggcacgcctcttctcgtcatcctctgcctgctgtgcctgatgcagcccgtcgccttcatggacacgctgtcccgcgccgtactggcggacctgtggccgcattcctccggctggttccacccggcctccccggcggcaggcccttcgcgtgaattcctgtacgcccacggcagctggggggaagcggctctgtggaacctgacgcagggccaggcgggcaaatggcagttcttcctgctcagcggccgcatctggcagacgctgggcctcttcatcctgggcatgctggcggggagatggcaggtctttgtggacgctccgaacaagcgccgcctgtttctgcggatgcttggaatctccggaaccctgtttctggctctgctggcggcgcgcctgctcctcacctcccggctggactccgcgctgggaacggacgctggacaccttctgcaccaatgggaaaacctcgcctataccgcggccttcgtctccgccgccgtcctgctgttcacccatcccggccttcccctgccatccaggctgctcagcagcgccggaaaatgcacgctgacgtgctacgtctcccaaacgctggtgttcaccttcctgttcttcgggtggggcctggggctggcgcaaggcatggggccgtgggcgtgcctctgtgcggcggtagccgtcttcctgcttcaagcctgggcgtgccgcctctggctagccctcttcctgtacggccccctggaatggctgtggcgcaccgccaccatgtgccgcatgcagccgttccgcaagcgcatgccataggaagggcggcccttcttcctccctgcgtctgtcaaagcccggtttccccggaagaagggggaataaagcgcatggcctcctgcgtccggtccgcgataaagccgttcctttcgtaaaaaggcactccttcgcggtaggaggtgagcaccacgttcaaatacccggcatagcgctttttgcacagctccagcaggcgggagccgacgccgcacccctggtacagcggatgcaccagcaggtaatggacatacgccgtcatggttccgtcatccatggcggcgatcagtcccgccagcctgccgccgtcccaggcggaaaacacggtcccgtaatggagcaatgcttccgccaggcgttccggatgccgcccggattcccattggacggaaaggaacaattcctccagcgccgccggggaaaattctttggtgtcagtgtaggaaagaaccatggaaaaaggcatttgtccgtaaaaaaggctttccgccctgcagggcggaaagcctgaaaaaagagggaaaagtgcttcactcgtcgtcttccgcgtcaaaggcggaatcttccgaatcaaagtcctcatccaagtgggcggtgaatttcttcacgcgctgctggacgggaagcggggagagcaccatgtgcatggtgttgccggccaggcgcggagcctggtccacctgcgccatggtcttcaagtccgcaatgaccttgttgaacatgtcatagccaagttcctggtgggcgttctcacggccgcggaagcggagctggaaacggaccttgtggccgtggtccaggaagctttccgcacgggccagcttcacgttgtagtcgttcgtgtccgtcccgatgcggagcttgacttccttaagcttgatcgtgcggctcttgttgtttttctggagcttggactgctggtacttgtaccgtccatagtccaccacgcggcacacgggcggatcggcattgcccgccacttccaccaggtccaggcccagggccttggccttttccagcgcgtcgcgcgtattcatgacgccgagctggtcgccgttggcggtcaccacgcgcacgcggggggcgcggatgcgttcattcacacgggtttgatcaccgcgctcacggcggcgattaccatcattattcttcgttggcttgattggcacgtccggatactactaaactaaataaaataacttggcaactcaaatcatgggggaaatatgacgctccgcaatttccctgaccacaacgtccgcaaactgttcaaagggcatcgcccccaggtctcccttgtcccggtggcggacggaaacggtgccttcctccgcctcacgctggcccagcaccagcatgtagggaacgcggtccaggcgggcgttgcggatcttcgcgccgatcttgtccggcgtttcatccaccgtcacgcgcactcccctggcggccagggcggcgcggtgcgcggcggccacgtccatcaccttgtcggagatggggagcacgcgcacctgttccggtgaaagccaggtggggaatttcccttcaaaatgctcaatcagcaggcccgtgaaacgctccatggagccgaacggcgcgcggtgcaccatcacggggcggtgcggcttgttgtccgctccggtgtaatgtaggtcaaaccgttccggcaggttgtagtccacctgcacggtgcccagctgccattcgcgcccgatggcgtcgcgcacgatgaagtcgatcttggggccgtaaaaggcggcttccccggcttcctcgctgtagtccgcgcccagccattccgcggcttccctcagggcctgttccgccttgtcccagttttccggagaacccacgtacttgtcgctttccgggtcgcgcatggaaaggcgcacgcggtagtccgtcatgcccagcgtgccgaagatggtcttcacgatgccgaggcactggcggatttccccggcaagctggtcaggcgtgcagaaaatgtgggcgtcgtcctgcgtaaagccgcgcacgcgggtcatgccgcccagctcaccgctctgttcccagcggtacacggttccgaattccgccagcctcacgggcaggtcccggtaggaatgggcgtcattcgcgtaaatcttgatgtggtgcgggcagttcatcggcttgagcatgtagccctcaatggtgccgtcagccagcccgttgaacagttccgcgcaggaagctccttcctggctcagcttttccatggcgtcccgttccgggatgggcgcgtactggctttcctgataatacgggaagtggccggacgtgcggtacaggtccagcttgccgatgttgggggtgtacacctgggaatagcccagcttgtccagctcctgcgtgatgaaatcctgaagggagcggcggatgagagcccctttgggcttccagaggatcaggccctggcccacggcctcgtcaatgcagaagagacccagttcacggcccagcttgcggtggtcccggcggcgcgcttcctccagccgttccaggtgctcgtcaagctggatgcggttcgggaagcaggtgccgtaaatgcgctggagcatagggcggttcttgtcccccttgtagaaggcgctcgccacgctcatgattttgaacgccttgcagttgcccgtacggcccacgtgcgggccggcgcacaggtccgtaaaatctccgttgcggtacagggaaatctcctcgtcttccgggatgtcatttagcagatcaattttaaactgggaagacgtattgcgcggccccagggcgcccaattccccggattccgccatcttcatggcctccgcgcgggaaataacttccttctggaaaggctggttttccttcaccaccttcttcatctcctcctcaatgcgctcaaaatcctctgtgctgatgcggtggtccagctccacgtcgtaataaaaaccgttatccacggcggggccgccggccagctgggcatccggccagaggcggcaaatggccgtagccagaacgtgcgcgcaggagtggcgcagccgttccagatcagacatctgatggcgttcttcaagagtctttctttccttgtgttcggacatacgcgcattagttaacctcccctaggcactgttggcaaatgcaaaaaaccctcctctccaaaaattcaaggcatgaacgccgcggagactttccggaagagaacgaacactctcccctttttcttctttacggttgccgcactggaaaatccggtataacaagaaattcatgctgaatgtcatctgccataccttgggagccgctcttcttctgcttggcatatggatcattctgctggactggtacgttttcatctcccttcatttcaccaagtctgaacgatggaacagcttttccttcacaccattcgcaggaggaatcctcagttgcgccgctctccggcttcttcctcctacccgagaaatgggcatccgatggcttcccatccttccggattccggtgtcatcctgtacagcgtccatctggttaaacaattcttcaagtttctttttcgtcgttccccataagcattttctcattttgcaccatcgcggggagaactggaaaaaacagaatgcaaccatttaccttccatccgctatccctccctcaacgagtgatttacacctgcggccgtttatgccatagtggcggccagcggttatgaaaatcctccccctctcccttctctgcctctgcctgccctgcggcctctcccggggcgaccagccgccggacggctcccccgtccgcttccagatcagcatggaccaggccgcggaacacaaggctccggaaccggaccctgttccggaccagagcacgccgttcaatgcggccaggctgctgctccgcgcccttcaggaaaaaactgactggaaaaacgaaccgtacaaatccctgcccgccacctccccctttgtaggccagctcaagctgaaaagcatcctttcccgcatggaggcggtccaggcgtatgtaaccggagcggccccggaacgccccccttttgtggatgaagcctccatcatcacccagggagacctggcgatggcctacatcctgttgccggacaagacaaacccgtacgtctatgcagccactgcggtggccctggtgaaaaagggcggccagtggaaggcctccctgaccccagggagctttgacaatacgttccttccctttgacgaccaaatccgggaggaagcgaaaaaaatatcagcggaagccaagaagaaaatcttcggcctcgcccaccagtactccgtggccgccgtcaaagccgccctggagcacatcaagcggttccgtgtggaagccgtaaaggggaaatcggacgacgaactcaagaccctgctcatccgcaccgtgaaaggggatgacccggcacgcattgccgccctgctcgtttccccgtactacatggaatccgccatcacccagagcgcccggctcacccccgtggtcaaggccatgcgccttcaggacaggagggaggaaagccgatacatccagcccaccaacctcagcttcatgacctttccgaacaccatcctggttcccctgcgcccccatccggatgaccagatagacccgaacaaaacggatgaggaccagcaggaagccgccaataagaacaatgcgaagaagagcggcaaggacattcacagcattgcggccatgaccatcctgcccccgcgcatgagcatgccggacacggacaagcccgctctcatttaccgctatgcgctggagaaaatcaaggaccccacggatggcttccccgtcttcaaaatgtatctgacggacgccttcacttcatggaacctgaaagcggacgaatccaccaccgcccgcatcatggcggatttccaccggacctacccccccctggcctttcccacgccggaagaggccgtgaccgccgccgggcgcgccctggcgaaccgggacagcctggccatgatacgcatgctggctccggccaaattcgcctccgtgaaggaatttgaagacgcgctctcccagttgaaaacggtcatgggcaggatccccgccccccggaccgaggtgaaggaaaaaggcgctcccgtcgtcaaggctgcctacgttcccgtcaccagggacggcgcccccggcatcaaggccaccatcggcgtgcggcccgcttccagaaacggattctccgtcaacaacctgtaccttaccaaaacagacagcggctggatgatcaccggagctgatgtggagaacccgctggcgctggacgaacaaaaaaaaccctgaaaaccgcccggggaacgcccgcccctctatcacacaaccttttccattatcacaccatgatgaatctaccgatacggccgcgccgcaacagaaaatccgccaacatccggggtctcatccgggaaacctccctctccccggaacacctcatttacccggtcttcgtccatgaaggaaccgggaaccagcccatttcctccctgcccggctgcacgcgctggagcgtcaagggcctggtggaggaagccaagcgcctgatggacctgggcatccgcacgctggaccttttcccggccatcccggacggaaagaaaaccccggacgcctgtgaggcctgcaaccctgacggcctcattccgcgcaccatttacgcgctcaagagcgaggtgcccggcatcaccgtcatgacggacgtggcgctggacccctacaattcagacggtcacgacggcctggtggaattccgctccgacggcacgatggaaatcctcaatgacgactccgtggaggttctctgccgccaggctctgtgccacgcggacgccggggcggacatcgtctcccccagcgacatgatggacggccgcgtggccgccatccgcgccaccctggattccgaggccttggacgacgtctccatcatggcctataccgccaagtacgccagcgccctgtacgggccgttccgcggcgcgctggaaagcgcgccgaaggagggggacaagaaaacgtaccagatggaccccggcaacatccgggaagccctcagggaagcgcagctggatgaagcggaaggcgcggacatcctgatggtgaaacccgccacgctgtatctggacgtaatggccgccatgcggaagcacgtgacgctgccgatagccgcctaccacgtcagcggggagtacctgatgatcaaatccgccgtggcttccggctggctggatgaacgggaaaccgttctggagactctaacctccatccggcgcgccggggcggacatgatcctcacgtattacgccccccaggccgccgaatggcttaaacaacgctgacgccgcacggcctccgcacaggaggtggacgtacggtccagaataccgctctccgcatgtctacctccacaaaaatatttgtcggcatcgtgatcgtcgtcgtcatggcgctcacctccctctggggcgtctatgcccccaccttctcggaagcctacgtactgcccgtacagatgacgacggcggacggcgccccgctgggcaacttccagtgccgcccggtggccgcggaaaacgggaagacgctcctggtcttccgggatacggacttcctgcgccagaccacggggaacatggtccattccaagatcatcctttcctacaagggcacgccgttctttgaaggcatcgtccccggccccatggaggccatagaaattccctccgggaaccttccgccccagttccaggcgctccagcagaactgacctgggctgctccggaaaagaaaacctccggaccgggaaccgccctgttatggcattgttactgaaagggcgcaggtttctctatacaaacagggaaacattgtggttttatagaatcaaacgatgagtgattcagcctataccattctgattgcggaggatgacgacagcatcaggcacgccctgacggacgtgctgaccgcatccggctacgaggtgctggcgctggaagagggcctggccgccatccgcgccgtgcgggaacgcaactttgacctggccctgctggacgtagccatgccgggagctgacggcttccaggtgctccaggtcatgtctgcggagcgccccggcacgcccgtcatcatgctcacggcgcgcggggaggaggaggaccgcgtgcagggtctcaagctgggggcggacgactacatcgtcaagccgttcagcatccgggagctgctcgcccgcatcgaggccgtgctgcgcagatccccggaacggccgcgccagctccgggaaatccggatccccggcgcatccctggacagcgccaaccgcctgctcacctttgaggacggaaaggaaacctccctgaccgcacgggaattcgaattcctcacgtacatggccacccaccccaaccgcgtcatcacgcgggacgaactgctccggcgcgtgtgggacgtggacccgcgcctgacggatacgcgctccgtggaaatgaccgtcatgcgcctccgggacaagctggggaccgtcgcggccgccccgctggaaacgctcagaagccagggctaccgctggaactcatccttcgtctcctgacccgtgaaccggcgcatacgcatcactctgctggcaatcagcctgctgctggtcatcggcacgctcggatggctcacccacgttctgctggtgcaggcggaggaaactggccgctccgaacagcgcatcagggtggaggccctggctcatgaagccaagctggaaatggaccgcctcctgacctccttcatcacctttgaacaggcccgcggctactttgaataccagcccttttacgcctacaagcgcccttatgaccagcgcatgggctccccggaacccggagaggccgcccgcggctccaacctctcctcctacctgccggactacgtcacggcctatatccagatttccccctccggccatgtaaccggacccgcgctgaacccgcagcttgccgaacatctgaatgagcagaaggacctctaccagcggctgaacggcaaggtctccgccctcacctccgtgccgtccagcggcaacctctggacggacatccggaatgaaatcctgcatgaagccccggaacctgagccgacggcatccggcacgccggcccaggtggaaaccgtcacctccttcgtcccagtggaagacggggggaacctctatatcctgcgccaggtgcacaccagccgcggcgtctatttgcagggggccctgatgaacatggacaacctgaaccggcggctgcccggccaggtaaagctgttgcttccccacagccgcctggctaccttcgatccctccgccccgcctcccgcagaagcgcggcaaacgggcacgctcccctttgccaacgcccccctggtctttctgccgggagacaccggagccgtccccctccaggaccacaagaaaatgctgacctggacgctcacgctcatctggagcatggtactgctgggcgcggcaggcgtcatctggctcatgctgggcaccttccgcctggagcagcgccgcggggacttcgtctccgccgtcacccatgaactcaggacgccgctcacctccttctccctgtatacggaaatgctggaggacggcatggtgccggagcagaaaaagccggaatactacgccaacatgcagcgggaatgccgccgcctggaacacctgattgaaaacgtgctctcctactcccggctccagcggaacgccatccgccgcacgcgggatacgctcacctgccaggaactctttgaacccattgcggaaaaaatagaccgacggctccgggaggcgggcatcagcttctcctttgccctggcgcagcccatccgcatcctacccattcatacggatgccgtctccgtggagcagatcatggacaacctgacctccaacgccattaaatacgccaagggggaaaacgccaaagtccagctcaccgtccaggcggaccgccacaacatcgtcatccgcttccgggacaacggcccgggcatctccccgaaaaaccgcaagctggtgttcaagcccttccggcgcacgaaggacgcctccgacagccgcaagcccggcgtaggcctggggctggcgctggccaaggatacggcacgctccctggggggggacctgaaactggaattcggcaccttggggggagccagcttcctgctgacacttcccaaatcctgaccccgccaaggggcctgcacgcctccatctgcttcccggcccgcacggaaccatctttcctcttccatctttcctcttccatctttcctcttccatctttcctcttccatctttcctcttccatctttcctcttccatcgcatccccttcccttgcaacatccggcccaggaaaatcccgtccggcatgctatgcgcttgccttcacgtgacggatatgtgacattgaaccgcaacgcacggcgggacgaaaaattcccgttccacgcaggaatatccgccttcccttccggcgcggcggagcgcaaaacgcatggacatgctatcatgagtaaaaggattttgatcaccggaggagccggcttcatcggctcccacctcagcgaacggcttctgaaagaaggccatgaagtcatctgcatggacaacttcttcacgggcagcaagcaaaacctccttcacctggcggactatcccggatttgaaataatccgccatgacgtcaccgttccctgcgtgatggaagtggaccaaatctacaacctggcctgccctgcctcccctccccattaccagtttgaccccatccacacggttaaaacctccgtgctgggcgcgctgaacatgctgggcctcgccaaacggtgcaaggccagaatcctccaggcttccaccagcgaggtatacggcgaccccgtggtccatccccagccggaaacctactggggcaacgtcaatcccgtgggcgtccgctcctgttacgatgaaggcaaaagatgcgcggaaaccctgttcatggactaccgccgcatgaacggggtggacatccgcatcatccgcatcttcaacacctacggaccgcgcatgaacccgaacgacggccgcgtggtctccaacttcatcgtgcaggcgctgaaaggggaagacatcaccatttacggaacgggcaggcagacccgcagtttccagtacgtggacgacctggtggaaggcatggtccgcatgatgaacacggaaggcttttcaggccctgtgaacctgggaaatcccgtggaattcaccatgctggaactggcggaaaaagtcattgaaatgacgggttcttcttccaaaacggtcttccgtcccctgcccctggacgacccggcccagcgcaagccggacattcggctggcgggagaaaaactgggttggaagcccaatattccgctggaaaaaggccttgaaaaaaccatcgcctacttccggagcattctgtagcgtttccgaggcgccgcatgcttatgcggcaacttaatcattattggcgaactgatttcattaaaaggcgtggcttacagccgcgttcctttcggttgccgcataggcaagcggcgctccaaggaagcaatccggaaattccgggaagcttcccatgcggtccatgaactccggcatgccgagcggctcattacccgtttttggctggtgcggtaaaacggttcggctaaaatgaattgttatgaaacatgccgacgcccacggaatctattccactcaagccactgtccgcacttatgaaagcggtgcggacggcctcatgaaaccggaaacggttctgcactggtttcaggaaatagcggaggcccacgcctcctccctcggcttcggctatgactttgtgatatcccgcggcctggcctgggtggaagtgcgcctgaacacggccatcagccgcctcccccggtggaaggaaacggtggaactccgcacctggaccgcgcaggaaacgccgctgctggcgcgccgcaatctggaaataagggacgccctgggaaaccaaatcgtcacggcaagctgcctgtgggccgtcattgacgtacgccgcagacgcccggtgccgttgaacaggcacattgatgccttcccggatactccgtgtgaagaaacggtggctccggcagccatggatacctcgggccttctgccgaccatccgggaatggatggcggaacgccgcgatacggacttcaaccgccacatcaacaatgccgcctacctggtctgggcgctggaatccctgccggattcctggctggagaaccatgaattgacgggaatccacctgcatttcaagaaggaaacccatgcgggagaatccatgaaatccctgctgttccgccaggactccctcacctcccaccacatcatgcacggagacgaactgcgggcggaagcagtgctggaatggaaagccgccgcaatcgcataaaaaaggccctattcctcgccttccggatttttctgacatcagacagcggacgagggcatgcaagagtattctgcgccgttttatagaatcggaaggggcgtgccgtgtgaagggcggcgagcggcgcggggagagtagtggacaaaatggacttgatggacaggatggacaccattttcttttttctattctgtcctttcagcccacacggcctattactccggaggacgctatttccttacacaagcagggccgccccggctcttgtccgcaacggccctgctggcttggagagtggaacgtctccgctccactctcctctctcaactttcaactctccttaaaagtcataacggtagcccacgctcccgttcaccgagttggctccgtcacggaagtccgcgttcccgttgatgaagaccgttccctgcgttcctaccggcacgctcagccccgctcctatttgcagcgccgtcgttccaaccttggccccacgcacgctctgcatgaagccggggttgcccagcagcgccacattggtttctccgcggcggtcgcccatgtcctgggccgcgttcacccggaactcagccagcgcttctcgcccgaagatgttgctgcctacaaggcccatccaccgaccgccaagtgctaccgttcccgtcgtccattcctgcttgcctacattcaggcccgcgttccccgctcccgtttccgtgtagccgtccatgtgcgtcgtcactaccgaggcgttggccaggggctgcaggatgctgctcttgtcttcgttgaggtacacgtcgtaggtcagttcatacatcgctccaaagccccacccgttggtgttgccctgcgtcctgtagctgccttccccgtagttgaccgtgcggttgagcttcgcgtcgttccaccctcccgtcaggatcaatgtgtgcgcccagcgcttgctctggtagcggccgaagaggttggcgtagtagctgtccaggtggccgtccgcgctgtccgccgcgctggccgtcaggtcgccgtagttggccgtgaaggccgctcccatggtaaaatggtcgctgaggtccacgtccatgcccacggtgccgccccaggtggtgagctggtagccgctttcatcccccctggtgtccagtttggcgtaggagcccgtgccttccatccacatgtggaagtaggggaggtcatcgttgacgtaggcggggttgacgcccatgagggtggtgcggttgcggatccatcccatctggtcgcgcagggcgtccttctgggccgttcccagcgcgttgaccgtgctgcccgctacggctgccaatgccctggatgctcccgccaaatcaggattgctccccgtaaccatggtgctgatggcattcatgacctgcccgagctgggaagtggcgtccaggttgttcctggctccccacagaagttcggaacctgctccggaattatgggaattcaccgcaggcttaaaaatattatcctgctgtaccgtggcgttcagcacaatattgtttccttcccggaccatggtcgcatccttgtaatacacggcaaagagtccggaagtacccacggacatggattccccttccgccatgccgtcaatcgcgtccgcggtcatcagcaccactccgtccaggttgtcatacgttcccaggcccgtgttgccggtcatgttggcaagcgtaaagccggcgccgttcccgatggtaatggaatccgccgtcagcatggcggagccgaaaggatcggccgcgctcaggttatacacgaattccgtcatggaaccgctctggaagtcaacgctgccgacgttcaaggtggtattggggtcccctgctccattcccgatggcctcaatgcgcagggtgccggaagcgcctaccgtaacgttgcggtagtcaagcgcgggagcggcggacgtgcctttcagcaccagggtgccccctccgtgcacgcccaggtcatacgtagagcttccggtctgcatcacctgggttaccttgccggagacgtcaatgctcccttccccgtccagtgtgccggagaaagagccgttcacggcggatgcggaggtgacggacagtgcattgccattcagggccagcgttccagcgccggagagggccagaatggacttctccccggtcccggacaggctcagcgttccgttcagcgtcacggaggttccgaacaggccggcttcccctgccagggtgagggaagaaccttcctgaacgttcaggcggcctgctccggaaatggtggtcgcctggtccagggtggaatccccggcagtcttgagcgttccgcccgcagagatttgcagggagccgccctccgcgtcatctgccagggtggccgtcgtggtccctccgatcacgacgcggacgggttcatccgcagaggcggaggacaaagtcagcgtgccgatattattggcgctcccgttcagggccagcgtgccttccctggcaaccaccgcattggaggtattaacattgccattcagcatcagggtcttttctcccgtcttgatcaggtccgcgccgtcaccgttcacggtaagattgccgttgaacacggagtcgtccagatcgttcgcaagttcgatatccagcgaaccgtccccggcggcattcaccaccaggttgcccgtgctgccggtgccggaggaaagatgccggatgatggtcttgtccgtattggccgcaggcacgtcaaaattcagggtgaggtttgtgtccacaatcacctgcgcataggaattaagggccggaatttccgtcaccgtggaaccgtccacggacgaaatgtaaatctggtccgttctgccggaaatgatgatgctgccgccttccacccccttgatgccgaatcccaggctttccagcgtggcattgaacgtaaggtgctggttgagccacgccaccaggtcgctggaaggcaggccggtgatcgttccgtcggtcagcagaatgcctacggattccagttcgcgcatggcgatcaggatatccgtatcaatgtccatgtgcagcgtgaggtcggaagcgtccccgccgaaggaaacggtgcccgtggccgtgtcattgaactggagcaggctcttctggtccccggcagcggcatacgtggtattgttcgcacccacatgcagggaattattccccgtcagcgtcagatttcccgtcaggccggtaatggccgttcccgccgtggcggtattgatgccgcccaccttgtccccggacaggccgcccaggtcaatatccccggaattggcctccgcattcacggttacgccgccggcagtggcgtaggctcctgcatgttgcagccctcccttggtaatggtgatgttgttggcaatcgcctggttgttcatgtccagaacggaaccgccgttaacggaaacattcccggtccccagggaaccggcgcccagcgccttcaccgtgccgccgttcagggtggttcctccctggtaattgttagcggcgttcagttccaggaccggggacccgccggccctgttcacgatcagagctcctgccccggtaatctgcccgacccaggagcctgtgccctctccattgcccagctgaaccgtgccgctggtaatggtgagcgtccccgtagcggtattgtcctgcgtcagcaccagcgttccggttccggcctgttccaccctggcgttcagggcgccttccgctcctacggtggcgttcatcagaacgaggtcattggtgtaggagaatttgaacaagcttgttccgccatcagcctttaacaccacaccatccccgaaaagcttgccatcattcagggtcgccgccgtattgttgccgaatgcccaggtaaacagggcattgccagtgcgggtgaacgccccgtggaacccggtcatgtctcccgtcaagtaggcgaaggcatcccccagtgcggtggtcaccgtacctgaaccggtgaatgccccgccaaagtaataggacttgccgctccctccgttcaagtaggttcctttctccagcacattgatcgttgccatgacggcggtatccgccgtgttgacggcatccatccagaaaccgcgtccattcagggttaacgtccccctccccatgctggcggcggtggcaaactggaggtcgcgggcatcatttgtactgcccggattattattcaacccggatgcgaccagttccccggtaaaggatgaattgtctcctgaaatgtaaaaacgggatttggccgcctggttgtccagctcaatccggcccgctccgctcatgccgttgatgacgatgttggcgctgtttccggaaggcattccatcgatggcgctggaaatggcgagggttcctcccgcattcaccgtgactcccgcggaaaacctcgtttgaacatttccggaggcaatggacacggaacctccgtccaccgtcagagcgcccgcatacacggcggcgccaagattcaaggtgccgtctccggatttttccatggccatcgccttgtaattatccacggaagcccacgttacggcgttcccgttggtatccactttaatggagttcttgctcgtggaggaaatctgtccggaaatatccgccgtcacgccagcgccatactggaggataccgccgtcaaacgacagactgccggcgccgagggcggcgtcatctcccatttcaagcgtgccgccgcccaggatcacctttccggtatagttggtattggccgtattgatggtcagcttggcgttgccggtcttttccagattaccgttgccttccagagagccgccccctgccgcggcatcccatacataatccgtcgtatccgcctgcaccatgataatcgtgggagagacggcgccatcaatggtcaccgtctgcggggcgctgccgccaatgtctcccatgacgactccggaattatcattgtaaacgccgtcgtccttccacggggaagcggcgggagcagtgacggaccagattccgtcgccccccttccattcaagcaaagccacctgcgccaccaccagggtaagcttgccgttccccgtgctccaggaacccagaagattgtcgcccaggacaaaggaactggcagaaactccggtgacggtgcccgcgctgatcaggtcataggaaccctccgcccaggccacgccgtctatcgttccctgccccagaagcagttcgctgttcacggtcagcgttccggtcacattgagcagagacgcgccggaagccggaagattggaaaaatttaaaaaggaggattcccccagcgtcagattgcctgtgatcgtgccggacgcgcccagcgtcagactgccagcagcggcaataccaagagttccaccattcatgttcagggaacccgcggcggcaagagtcacattggaaaactgcgtggcggcgtttaccgtcaggccagatgaaccactcacggtcagcgtattattgtaggtagcatcatgctgcgctttcaaattgcctccattcaggttcaccattcccgaacccagagcagtagcattattcaactgcaatgttgcccctcccgtaaccatccagttcgctgtcatggcttgacggttcctgttgacggattgatcagttacattcgtcgtctgtgcggccgaattcaaaatcagcgtaccagaataccccacacctcccacagtaattgtggggggatcagtaatcccttccccaaccgcaagcgctccataaacgttcatggtcttgcctgcagcgatctggaacaaggtattcgcataaaatgaaacgccctcccaggccgtacccgttgatcctaacgaaaaatcctccccgatgttgaaaaccgtcgcctgcccttctcccggagcacggaaattgacgacgcgggaaccgccgtcgctggaggatacactgaatcctgaagcacctgccgccacattaatgccacccagcgacaagctattgaactgggccttgacggccttttgaacattatctccatatggtccgctgaattgcataatattggcactggttccggcccacacgtttgcataattggtcggcgccggattccagttggcatttgtatggatccagccatccgttccgccaagccatgtataggtttccgccaaggcatgcggtgaggaaacggcggccatgcaggcaatcagagaggacaggagacccaagggaaggtgcagcttcataatttttaatgaaaatgaacgtgaaaatacctcctgaacctgacaggaggctttttatcatcattaacggattaaaaatcctcctacaagcttaaacgttgattccgtaggcgttgcaactctcctggaagaccgttttcatgctatatctggtccgcaatcaggtatgttcgtggtggtatccttatcagtataaacatgcaagcaggttcattctggtatattggcggcttttccgttccctagcggatttttaatccgccttgcgaatcattccggatggaatcaataatccattttaacatcatttattccactatatgatatcaactgcgctactgcaccatgccggcagaagcgccgcacagcatgcaatgttccgtgacgcagcagggccgttccggacaatgccggaacggccctggaagtccggagagcagagcgtctccgctcaactctccactctcaaacttcaactctccttagaagtcataccggtagcctacgcttccgttcaccgagttggctccgtcacggaagtccgcgttcccgttgatgaagaccgttccctgcgttcctaccggtacgctcagccccgctccgatttgcagcgccgtcgttccaaccttcgctcctctgaccgtctgcgtatagccgggattggccaggaagcctacgcccgtcttgccgcggtggtcgcccatgtcctgggccgcgttcacccggaactcagccagcgcttctcgcccgaagatgttgctgccaatgagccccatccagcggccgcccagcgcaaccgttcccgtcgtccattcctgcttgcctacgttcaggcccgcgttccccgctcccgtttccgtgtagccgtccattctcgtggttactaccgaggcgttggccaggggctgcaggatgctgctcttgtcttcattgaggtacacgtcgtaggtcagttcatacatcgctccaaagccccacccgttggtgttgccctgcgtcctgtagctgccttccccgtagttgaccgtgcggttgagcttcgcgtcgttccacccacccgtcaggatcaatgtgtgcgcccagcgcttgctctggtagcgcccgaagaggttggcgtagtagctgtccaggtggccgtccgcagagtccgccgcgctggccgtcaggtcgccgtagttggccgtgaaggccgctcccatcgtgaagtggtcgctgaggtccacgtccatgcccacggtgccgccccaggtggtgagctggtagccgctttcatctcccttggtgtccagtttggcgtaggagcccgtgccttccatccacatgtggaagtaggggaggtcttcgttgacgtaggcggggttgacgcccatgagggtggtgcggttgcggatccatcccatctggtcgcgcagggcgtccttctgggccgttcccagcgcgttgaccgtgctgcctgccgcggctgccatggaacgtgccgcccgggaggtgttgccggactggatgtcgtttctgacggcttccctcaggtcaccgagctgcgtgcctttcggcgcgttgccgcggttgttccagagcaggttggcccccgcttccgagttggccgtgttggccgcgtccataaaggcgttctccgtcttgaccatgcccgtcaccacaatcttgccgccttccgtccggatgccgaattcctggtagtagaagtcaaagtagccggaggcgtccaccgtggctccgttggccgaaaccgttccggctcccgtcgcgtccaccagcgtgaagttgaggttggccgtcgggtccgccggatcgtcgtagtcccccaggcttcccagggaaacggtagttccgtccagattgacgtctccggcctgcacggtgatgaccgggctggagaagaggtcgtcacggttggtgttgatgaccaggtccagatgggagttttgcaggttgagtccgttggcgacggtgagcgtcgtgttgaccgctccggttccctcccctaccggactcaggcgcacatgggcgccgcttgccgccgtgaggctcttataggtaacggagccgttgccgccttccgctcccgtcagttccagcgtgcccttggtgacgctgagggcctgcccgatcgcgccgttccccttcagaacctgcgtgccggtgccgttcatggtgatgctgccttccccgctgagggtgccttcatacaaggcattcccggcggtggtgatttccagggcagacccgttgttcagcgcgccggttcccgtcaggccggagatggtgttggccgcgttgccgagttccagcattccgctgccgtccaggtccacctgcacgccgtcaagcttggaggtgccgttgagcgcgagggaggcggtgtccgccacatggagcacgccggttccggaaacggtgctgttggaaagttcggagccggctcccgtaagcgtgagcgtgccgtttttaccgatggcgaggttgccgccgttgccttcatccgtgagcgttcccgcttgcgtttttccagtgatgtccagggaggaaaggtctccggagttggtggagttgagcctgatggagcccaggtccgccgtgccggagaggataaggctgccgtcctgcatgtccagcgtgccgctggtgttcagggttccggcgagttccagggagccttctcccgttttggtaatgttggccgtgccgccgttgatggttccggagtacttcgtatcgggaccggacgtattcggatctgttcccagcagctcgttgttcaggatgacggatgccgtcttgtcgttcgtgctggtgatgttgatgacgccggaggccgcgccggagaggttgttaatcgtcaggccgtcagccgtatcgtccacgcccgggaggttgagtgcgaggttgccgtccacgatgaccgcgcggtacgggtcgagttcggagttgctggagacggttttgtcttcactgcctaccgcgtagatttgcgtggcgtcaccggtgatgccgatggagccgccgttgatgcccgtgacggcaaagccgagggtttccagcagcgggttgaagacggccgtgccgtagcccagcgctccgttcgtgaggttgagccacgcggtgcggtcgcccgctccccagccctgcatggcattgatgaggtcggcggagagggtgagggtgagggtttcaatttccagctgggtgccgtccgcgtcaaattggatcatggaggtgcttccggccaggtcctgtgttttggagacgttgcccgttcccaccaccaggctggcactgtccaggctggcggcgccgttgaggccgctgatgaccgttccggcgtccgtcatgccgatggttttaagcgaggagccggagaggccgcccagcgagatggaagtgacgccggaggccgcgttgacggtaacgtttttggttcctttgtggttgtttcctcccgtgagggtgcctccggtgatgttgagcgctcccttgtagccgtccgccgtgagggcgagcgtgccggaggtgagcgtgaccgtacccgtgtagcctgcgctggcgttgccgagcgtgagtgtgcccgtgccggttttcaggaggctgccagtgccgctgagcgcgccgttgagggtgatgctgccgcccgtagtgtccacggtggcggttttgccggaggcggcgttgaggaggacgctgagggaggcgctccagtccgccgtggagttgagcgtgccttctcccagggtgagagtgccggaggcgccggtgatgtcaccgcccagcgtgagggttccgttgccggccagcgtgatgccggagttggagtcgttttccaggttgatgccgcccaggacggccgtgccgccgttgatgttgaggttgccggccagggctccctggccgttggccccgcccagcttgacgctggtgctggtgagggtgacgcccgtgttgacgttgaccgcggaggcttgcgtgttgcttcccatggtgccgccgccgatttgaagcgtggcgatatcaaggtctttcttcaagtccagcgtcacgccgtacgtgacgtcaatgaggtcggcattcagcgtgccgttcaccgtgacggtgcggttggccgtggccgctccgtagccggagaggacgatgctgcctccggcattggagagcgtgccgttgagcgcgtcatggccgttggccgccttgacgagcagggagcccccgtccgtcttggcgagcgtgccgctgatgtttttgagtacgccggagagggcgatttcattgcctccggagagcttgagggtggagccgctggccaccgtcacggttccggagagaatcttggtattggcgatgttccccagcgccacggctccattcccggagatgttccagttgagggacaggaagctgtcctgcccggccgtgtccaccgtcagcgtggtgccggttccggaggcagccagcttgaccgcgtccccggcgtttttctgcaccatggtctgcgtcagcgtcacgttcccggaggcctgcagggtgccgccgccgaagatgatggaacccgttcccagcgctccgtctccgttgatgtccacaatgcccccttccagggacgtggagcctccgtaggtgttcgtgttgcggatttgcagggtgccgtcccccctcttggtcaggatggtcgtggcgcccgtgatgtgcccgtctccctggaaggtgtaggtgttgtccgcgccgctgttgctgacgacgatggaggagggagccacgtctcccgtaatcgtcacggttttgttggctgccgtgttgtcaaagagcaggggctgcccgtccgtggtcgccggcgcggagccgcttccgccgtaggtccagttgctcacgtcgcccgcgctccatgttccggcgtccgccgttccgttccaggtgagcatgttcgcggaggactcaatcttgagctgaagcgttttgccgtccgcggaaagtcccagcgtgtaggtcagttccggatgggcgtcattgatgagatctccgatgttgaaggagccgagcgtgagcgttccgcttcccaccgtcagcagggaatagtctcccgcgtcggtgagcgtgtcgtagttgttgagggtgacgttgtgcgttccggtgagcgtcagtccgccggtgagcgtcaccagggcgtttcctcccgccgtcagtcccgtcatgtcaaaggtgaaggaggagcccgcagccatggccatgtctccggtgacgttgaggcgcgagtagctgcccagcgtcaggctgccgatggagccgccgttgctggtgatggcgcccgtggagagcgcatccgccgtgccggctttcacgttgaccgcgttattcaccgcataattgccgatgtccagcgtcgctccggaggagatggagaccgtgctggtcccgaacgccgtagcgcttcccgccgccagcgttccggcttccgcattggtcgtgccggcataggtattggcgccgctgagcgtcaccttgcccggacccttctgggtgatggaacccgttccgccgatggcgttggccaccgtctggtccgcatccaccgcataggtcaggaaggcgtctccattgccgccgagcgtcaccgctccggaacccagggagccggctcccgtcagcaggatggtcccttccttgatcagggtctggttggtataatcgctggccttggtcagttgaagcacgccgttcccctgctttacgaggttggcgccgttgccttccttggctacgattacatccagcttcaaatctgccgtattagtatcgtccagcgcaaaattcccgcgcgctatgtcaaagatgaccgtgccgccgcggagggtcagggcattcgcctgaccggtggagggggctccctccgccacagagaagacgctcattccggtagcggactgctgcgtcacaatggtattggtgccgctgaacaagtcgaagccgtttaatcccccgccgggtatattcagaatgacccggctgttgttgaacaccattctggtattggccatggtcgtattgccgccgccgacattccaggtgccgttgttcagggtcagcgtgccgaagttcccgctattattgtagccgaacggatcgcccgccgtagtattcagcgtgccgccgttcaccatcaggttgccgtaaaggatggactctcctccgtttccattcttgccgaggttcaggaccgcgccctcgcccaccgtggtcagcgcggttttcgtctgggcggtggaaaccgtcagggccgttccggctcccgacacttccagattgatgccggagccgttggccagattggttccaagcgtattggcgcctccggaagcaaaggcgatcgtgcctccgttaatcgtcggcatcgtggctcccagaatatccgcaattccgcccgttacgccgatttccagccgtcccgtcctgtccacggtcaccgttccggtccccagggccatgttcgccttcacggcaacggttccttccttgatgttgaccgcgccggaataatcgttattggagctgttgaaggtcacttttccttcacccagcttggtcatggcgccgtttccggaaagcttgcctccgttgttggtcagctccaggtcctgccctgccccgttgttgaaataaatggccttggcattcacgtcccccgtcagggacgccactcccgtgtgcgtaccgtcaaacaggtaggttgtggtgttgtccacggcgccgatcgggttgccgtcccagactaccacgccgtccgccatgctgacggaaacggtcaccgtcttgtccccggtgtttacgttgaaggttccctggtacaggctggccagcgccccggtcagggtcatcgtccccgcatccgcgaagttgccggccgtcaggttgtcccaggaaaccagcgtataagtccccgcggtgatattcccgttaatgtccaggctgacgcccgcatccgcgcccagcgccaggttgctcaccgtcagcgtcgctccgtccgcgctcagggcgcttccgtcaacggccagtgaagcggcgttcagcgttccggtcacgttctgcttccgcagcgccgtcaccttggcggtggaggcgttcagcgttccggccagcgccgtatccgcattcaggtaaaggttggctccggaaaggttcagcgttccggaaaaaccggagacgtccccgcccagcgtcagggctcccgcattgttgcgggtattgacagccagcgtgcccgttccgcccaggccgccgagcatctggaggctgtccccgctcgcgatggccgccgttcccgtgccggacgtttccacggataccttgccgttgaggttcacgttcacggtggctccgttaaaaatgctcagcgccgtggccgcattcgtccctttcagggtgatgtccccgtccagggaaactccccccgtgacggtattggaattcaagttgctgaacgtcacggtgacgtttttctcactgccgcccagcgttacgttgccctgcccccacggggtcagggtctggccggagacgatggaggcgtccccgatattgtacgtcagattgaccaggttgcccgttccggctatttccgtatccccgtcataggaattcttcacccagcccgttataaaaccccacctgttccccccggcatcggaaatgattttaaggccgcccgttccggtgatggtggatgaaaccgcggtggcatttccataaatggctccattcaggaaagcaaatcctcctgcggcatccaggacgattttcatgtcgaaattcgcgccggcggcatttccgttcctcagatgcagggtggagccgttccccatggtaagagtacccgtccccgtcaccttggttctggcgcccgctacgtccatcacggtattttcccccagcgtaatgttcaggttggagctccatgttccggtttcgtccgcaagcatcacggtgccctgttccacaaccagcgttcctcctcctgaagcgttgaaggaattaaggcccagcgttaacgttcccgtacccgtcttggtgatggtgccgttgattcccccgttcagggtggagtcccccgcgccaatgaccagggaaccggggccgctgttggtcaatttgcctccataagtgccggcccccagcaggaggctgccgcttcccgtacgggtgacggtccccgtccagccggccagtgaagcccacgttacggcattcccgttcgtgtccaccagaatggagttggaagccagcgcatccgtcttgatctggccggagacgtctgccgtaatgcccgtgccgtacttgagcgcgcctccattaaagatgatgctgccggtgcccagcgcggaggcatgctgcatttccaccgtgccgccgcccagcaggacttctccggaaaaaccggcgttgtccgtggcgatggacaaggttccgctgccggtcttctgcagcttggagcttcccaccagggaaccggaccccgtccacgtgtaaccggttgcctcagcattgacgacgatcaggcctggattcacctgtccggcgatgttcacggtctgcggtgcattgcctgctacgtcgccgaagatgactccgttgccgttggcaaaagacaatcccgcattccagggggaattccccgttcctcccaccgtccacgtattgtctccgccgcccgtccaggtcagcgacgtgacctgcgccacgacgaatttcagggtattgtccgtcgtgctccagttgccgatgtattcggtccccagcagaatggtattggccagatccccggtgatgccgcccgtggcattaatcagattgtacgtgcccgcgctccagctcacgctgtcgctattctccagcagcaggctgccgttcaccgtcagggcgccgttcagggccagcaggggattgccgttcaccgtcatgtgagtggcgtcaatccgcacggccgctcccaggttcaggttgccggtcatcgtattctgccccccaagggacaggacgccgccggtcatggacaggccggcattgctgtccacggcggagacgtccaggcccgctcccgcggacagggaaagcccgccgtaccccgcggaaatgccgccgatggccgcattccccgttacggaaaggttcttgttcgttcccattccggaggcatggctgacaatgagggtgccccctttcagttccacgccgcccgtgaaggaagaggaattggccagggtcagcgttccggagccgtccttgatcaaacgcccggttccacggaatgcattgtcactgcccgtgatcatgttccctgctccggtaatggtcagggcgccgttcagctggatattatgagtgttgtcagcagtgatggacatggtgctgccggcattcaccacctccacggcgccgccgcccgcggcgactgtcaggccgttcccgaaggttccgtcgctttccttggtaatctccaggcgcccgttgttcaaggtccagtaccccgtattgacggccatggaacccagccccgcgccgtcataggcatattctcccacgcgcagcacgccgccgttggtgacggttaccttgtagcgcgtataattatcccctttcatgctgaggctggctcccggagagctcaaatccagcgtggcgttgtcaatggtcagggtcctggttccggagccattccccgctttcacggtagccgccgtttcaatcttgaacacgccgccgccggtaatggtaaggctgttgtccccgacgttgaacgctccctccgcctgggtaagcgtctttccggcctcaatggtcagcgtcaggtcgttggcgccgatggtcgtagcctcattccaggtaacgtccgtatcaaacgtctggttggtcgtaatggtgaggggatcagcctgaacagaggcggacaacgcagcgcagcaggcaagaagagcggacaacaaattgaggggcaaatgcagcttcataaagaaaacaattaattataaatatattgagaaagacgtggtcttttagcagaaatgagacatgctattaggtagatgaaatatcggatttgaaatccggtgtcaatctggaagtgccgtttccaaagctttaaattatttccgttatctccattctattccatgccctcattcaaattagccacattattcaaaaaacaaaaccaacagaatttaaaataaacatctgatcataaacaaattatttcatttccaccactctcacgacttccctgacgcccttcttgtccggatttcaaatccgttcattttctttccctgcatgcagggccttcaggcagccgggaagccatccatgaagggcacagtaaaaaacctcctaaggatttcatcatgaaaccgcttgtttccggaaattccgccgcgggagcagaagcgtgaaatccagtcagtcccatgaaaaacaacatccttcccataaaaggcatgccggagccagggacaaattccgggaccggtccggagggagcaaaagcagcgcgggatgtattctttcctccttgctccccgcccggcaagttgctagaatacgtcaagcaagtttttccccttttcccatggccatttttggttcctccaatctatccgactccggcgacctgctgattttcaacaaagtatctcataaaaccctgctgatgttcgaaaaggaactgggcagggaccgcatgacgtacctggtggaagaaagcctccccccggatgcggccaccgccgcccatctggaatccaccaaggcggacggcatcctgttccaggccgggggcagcgatcccattgccctgcgttccgccatcatggaacgcatcaacgagggcagaagggtagtattcctgcccggtcccgtagcccacgtgaaaggctccatcagccacattcccccacgggtgatcaaggccctggaagcactccatatttcccccgtgccggtatgcacgggcttttacaccagctccgtgctggacgcggaggcggatacggacgcccaggcggatatccaggtgcacattctccccaagctggctcccggggcggaaatggcggcgcgcctcacctccgcgtggctggaatgctccgcccaggcctatgccacgctgccgcagttgcacggctccctgtccgccctgctgttccgcagcctaaagcttcattccgactgccgggtgatcgacggcattgacgataccacgctgacctacggccagcttctggccatctccgtggcctttgccaaacggctgaaaaagatcaccacgaaccgccgcgtaggcatcattctgccgcccggcaagggagcggcaatcgccaacctgggctgcctgttcgccggaaaaacgccggtgaatttcaattattccgcctcggaaggggcctttgccagctccgtgaagcaatccggcgtggactggttcatcacggcggataccttcatgcgcaagctccagaacttcccgtggcccccccagcgggacctgatcctcatggagcgggagattccgctgctcaagggctccgccaaacgctggggcgtggccatcaaattccttacagcggggttcatgattaaaaagctggggctggatgcgcccacgggcgcggatgaagccgtgctgatgttcacctccggctcctccggagaaccgaaaggcgtgccgctgacccaccacaacatcctttccaacatctcccagtgttcctcccgcatcacgctggcgccgcaaagcagattcctgggcagcctccccgtattccactgcttcggcatcacgatcgggctgtggtacccgatgatcggcgggtacgacatggtcacctacccctccccgctggaggccaagcgcctgggcgccctcatcaagcagtacggcatcagcctggtggtcaccacccccaccttcctgcgcggcttcatgaagcgctgcgagccggacaccttcaaaaccgtgcgctacctgatcgtaggagcggaaaaattgccggacgagctctccgccgccttccgggaaaagttcggcaccgttccgtgcgaaggctacggcctgacggaagcctccccggtctgctccgtcaacttcattgacccggccccgtccaacgccgccggagacttcattcccggcatgaaaaagggctccgtgggcgctctgcttcccggcatcgccgtacgcatcaccagcccgcatacgggccgcgtggtacccgtgacgacctccggcatgatctggctgaaggggccgaatatcttccccggctacctgggcggtccggaagccgaccgcgacattttcgtggacggctggctgaaaaccggagacatcggttctgcggacgaattcggcttcctgaaaattgaaggccgcatctcccgcttctccaagataggcggggaaatggtgccccatgaagccctggaagccgctatcatgaacatctggaacctggacccggcggacgaggaacggcggatagccgtcgtcaccattccggaccccgtgaagggggaggccgtggccctgctcaccaccctggtgacggactacgtgcaccaggcgcgcaccctcatcaggcacggcctgattgaccaggggctcccggccctgtggtgccccaaggaaatcattcccgtggagcacattccggtgctgccctccggcaagctggacatcaagcaatgcaggatgctggcttatgaagcgctgaacattccctttgaaccataacccatggaattcccggaggaaacgcctgccgctcccaggcccatcacggtcaaacagctcgtttaccgcctgagggatacggtcagcattgccgtggggacccagtgggtggtgggagagctcagcaacgtcaagcaccataccagcggccacgtttacttcaccctgaaggaacagggcgcggaaatcttctgcgcctttttcaaggctgcggcttccaaatgccccgtacggctccaggaagggatgaaggtccatgtgctgggcagcgccaccgtgtacccggaccggggccagcttcaactggtcatcaggcaggtgaaagccgccggccagggagacctgcaggcgcgctttctggaactgaaggaaaaactccagcgggaggggttgtttgacgctgaacgcaaaaagggcatccccgcctttccccgcgccatcggcatcgtcacctcccctaccggcgccgtcatccaggatatacgccatgtgctggaacgccgcgccccgtgggtgaaagcctacctgctgcccgtgcgcgtccagggggcgggagcggagcatgaaatagccgctgccgtgcgcgcctggtccgcagcccctctcaacggcctgccgcccgtggacgtgctcattgtgggccgcgggggcggctccatagaagacctgtggaacttcaatgaggaaacggtagcgcgcgcgatttacgaatgcaccgttcccgtgatttccgcagtaggccacgatacggacttcaccattgcggactttgtggcggacctgcgcgcccccaccccgaccgcggccgcggagctggctacgccggacggtccggaatggctccgcaagctggctagaatggaacaggccctgcacgcctccgcacggcattccctgttgcgttccaagctgagactggatgtttacctgcggggaaaactgctggatgcggattccctgctctccccttacgcccagcgcctggacgacatggaagaaaccctgctgaacgccgcggccacgcgcatttttcaaaacacgctccatatcaacaaactggaacatcagttacaaatgcgccatcccacccaccgcaacagggagcgcgcgcagcttctggcctccctccaggccggactggcccatgcggccgccgtgcgcatggcggatttctcttcacaactggctcttattcaagcccggctggaagctcacagcccggagcaaacgctgcgccgcggatacgccctggtggaaaaccagaataagcagctcatacggcaaacgaaccaggtacatgcaggagaaaaattgaaagtccgtgtctccgacggctgtttttatgtcagggatgacacaccgcaataggctgtccacaagagcctagcattgcattttttgcactcaatctaacaaattgtgttttttctggattttacaggaagtggaacctatcctaatagaagcctgtcactgctcctattacccggtcccataacttctgtacatatgccttgtaaaaacatcacccgctacacttacgaaacgacagcctttcaaggctatcggttggcgatctgtaagaacaagcgcttattcactcgttatttctccgattctcaatacgggggcgctgatgcggcgcttcaggaagcgatgagagtgagagataacattttcacactttttgaacaggggaaccttacggttagccaaattttcgcaaaatataccgtgcgttcccgccgtcagtccgccgctgaccgccgtgaaaaaatgatccacggaaaaagggctctcggccacgtgcggcagaaagccaaagtccgcagctgaggaatctgcggaagctgttttttcagcttccccggagccttgaatcataccggaaacgttgcatccggtacaggtggcgtatactcctatcacatcaaaaagccgttctccgtccggaaagcgggaataccgcagcatgcgcggcggagaaagcggcaatctgtaccaaaacgccccctttccgccatccgcgcccgggaaagccaagagcggcccggcaaagcaattccggcactaatgcggctgtgccggataagccgatcaaaggcctgcggcacgctgccaaggcattcttccgccgtctgtcgcccgcggcgcttcccgcggagggggcgcgggtcagcctgctgaaaagggcttcaattatctgcggcggcggcgcgaagcaggcttttccggttcttccgccggggcttcccctatcttcgccagcacccgccgggcctctgtggtccggttctgcttgagacacacgtcagcccagctccggtgaattttgttgtaaaggtctccggactggatggaggccagattattctggagcttcgccttgtcttccggactcagcgcatcccattcttcaaccagctttccatactgggcttccgacaggggccactgttctctgcccgcgcttatctcagcctgaagattcagaatgaccggctggagggcctggacaaacgtggtgttctcacgggccaccttcatcgcctggtccagatatttcatcgcctggtcataatcccgcgctttcaggaaggcggcggcgatgttcacgtcctcataagcccgtttcaccagagcctccgcctggccgtacttctcaagctgggaacgcagagcctcaatgtcctggctcaggctggaaccgctcagaatgcgcggggcatccacgcccagggtcatcgctgtcccttccgcacgggacagcaggcgggaagcctccttcaaatcccccatctgcatccttacccgcgccagggcaagcatcgtttccggcgtgcagtccatctccgtttccgcggcgcgaaagcagatcagggcggcttccaactggtcagccatggctttcagctccgcctgggaatacttacggcgcgcattgagcggcatattcagctcgttcaggatgattcggcccatatccggactggcggtcaggcggaatttggtgagcagttcccgggcaatggcgcttcctgtgccgccgggctgccccgtagtcttgtccggcagagtatcctgaagcagcagaatcttcaccatgctcttcacgtcctccggctttttcagcatgctcctcatgacaggggaggcggcctgcttgcacaacgcggaaaaacgctcaaacctggcctggtcatacgcatagtgggccagcggttccaggcatgccagacggatggatacctgctcctccggcgtatttttcaaaatcacttcataaagcttctccgccgtggcgtcatgcttgcggcctgcaaactcccgcgcccagttcaggctgacgcccagcaggcggttcctgtcctccgccggcatggaggcggaatcggccagcttcttttccagcagggccgccagcatcggttcggattccttcagcatgccgcgcctgtccatttccaccgccagcagccacgcaaaggaatcccgcgcttccggggaattcatccattccacctgcttgtccacggaggaagccatctgcgccagctccgcgtcggaaccgttccaggaggccagcatgccctgcaaatggcccatggcctgcgtctggctgtgcacctcgtgaatggtcggcttgaaccacccttcaatcgtgggccagtactggatgtagccgaaccagagcccacccagcagcaccagaaagagaaccggcttccaataagacttcttcttgcgtgaggggcggtagggcttgttggaaaaatggcgctcggaactcatgcaggcattgagccaaaaaggcggcacaaatcaagcaaaataaacacctcgcaacgtcttacgaggaccgcccgaagcctaccgccgggaggatctggcgttcccggacggcctgcgcccgggagaggccatgcgcacgcggggaaaaccggattccttccagcaggcatccgccttctccttcattcccaattcatcgtaacagcggccaagctgcttgtaattctccgaccgctgttccccctccagcatgggaagcaccgcttcaaaagtttccacggcctccttccactgctctccgtcgcacagggcgtatgccttgcacaaataggactgcaccagcaggcttctgcgctccggcccctccccgcatttcagcagggaatccactgctccggcataggcgtgcagggcgctttcccggtcccccgccatatcgctggcgagccccagggaataataaacccggcccagggacaggacgtccgaggcaaagtgggattcccgcagttgaagggctttttgcaggttttccctggccttgtccccctccccggcatccagccacgctttgcccagcccttccagggactgggcggaaatgacgggggaagccgcgctgttggcaatcgccttcaggaaatccgcgcgggcttccggagcggccttgcgcatgatgttcacccaccccctctgatcgtacagcccggcccagaacgcatggtccgccggcagcacgccgcgagcggcgccctccgcctggtaaagataagccagggcttcctcataattcccctgctccgtggaaatgcgcgccagcccgcgcagggcgttaaggcagtcattcaacaagtaggaggcgttctccgaaccggtaaggccctttaaaaacaattcccgcgcctcatccttcctgccggcctccagcatggcttctcccatgctgatgctcgccagggccaggtcaccggtcgtcttgtccggctgggggcacagggccagggccttcttgaaataggcgcgcgattccggaatgcgccccgtggcgcgcgccagccggccctgggcggccataagcctggaccggaccgggagggcgtccgtccccagatgggcggcggcgtccaccgcgcgctggagcagcacgttcgcctcctcattcctgttcagcatctggtcaatggaactcatggtctggagggcccgcaccagcggctcggccattccctccttctcatacccctccacggcggttttcaaataaccgtaggccggggaatactggtgctccgccagaagggccttggccacggcgtccgcgcggggggcccacacccggtagcgcccggaggcatatccggcgtcaatcaattccctggccgcaggaagggcgcggtccacgccgtcccggctgatcagctcacgggtgaggccccaggccgtctccgtccgcaactccggatccctgatccatgccaggcgttcctcccggttgtccagaatgccggccaggctctcgcgtgaagcgaaaacatccgccatgaagcgggataaattctgcatggccttttcatcgctcttctgcaccaccaccggcggtgtggtcagcatcccttcatcataaccgatgcggtacgccatatggtacgtcaggaactccagcagcatcacgagcgcgcacaagcacagggcaatcagccacttggtgcgcggagacaggggtttcaaaggagaaggggcctgcataacaagtgcataacgttacccggcgctccctgaatttcaagctttttgcatggggaggaaatctccgctgcacctgaaggcggacaaaccagccgacgacaaccgtttccccgccagtccccgggaccggcccgggaaagctttttcctgcctttttcccactttccggcccttctctccgccttccgccgggcgcttttctccgggccatgcgcggcaatttacgtcagccgttcctgcgcttccgttcggacgcccggtacaactgccaggcattccataaattatgccacagcacgtaaaacgtaggccccagcgcggcgatggggctggcatacgtcagcgccaggtaaatggacagcgtggtattcttctgccccagggcctggctgcactccgcggcacgggtacgcccccccagcaaatgccccagcccgaagttgatcccgcacaccagcagggaaactgcgccgatctgttccagcacgcgctccgaaatgccgtcacgggaggaaatatcataagaggcgttcgccgcgatcaaaaccagaatcaccacccagatgccgaaggtgacgtccttcagcttccgcggccacgcaatggcccgcggataaaaacgccgcgccgccagggccagaaccagcggcagcagcatcaccagggaaatattctgggccacgttcaggtaaatctcaaagccgccctgccccacgaccgccggcagaatgaaaggcagcagggcgcaaataatgccgttaagcagcaggagggccgtcagcatgaactccacgctgccgcccagcagccccatcaccacgggagccgccgtggccgtgggcatgatgcccacgaagaaagcggcctccgccaggtacccgtctccgaaaacgaggcggcacgcgccccaggccgccagggccacgagcaggttggcccctaccaggagccagtgcgcgcgctccggcttcatccgtttgaagcggatgcccagaaacgtcacaaacagcatcacgatcagcatccacttgaacgtccagctatacacgtgcaggccgggcatcatgtaccccgcaataaaagccgccacgatggcaaacgtgcggatgagggacttgaacatgtggaatgcggacggcagtgaaaaggttatgctggtttttcacacaaatggatcaggccgtccacctggcggacaatcagctcaaacaaatcctgcacgctgcccttgggaacccggttgttctccatcagctccataatcatccgcaaacgggtcagcaggccgatcatgatgctttcaatagccagcaccgtccagaaaacctggtacgtggaagcgcccggaaacatggtgcggatgcagtcatgcagccgccggcgtatgggggaatacacctccttgatatactccaccgctatctccggcgtctgcacgtggcaaatggccagcaggcgcaggtaatgggggaaattgcccagttcttccagcttcacatgcaggaggccgtggaaggaagggtaaacataggcgtgggccagcgcccgcaccgtgcctttctccatggcctcattcatcatggaaatccggaaatcccgcgcctgcggcgcatacttcatcatgaccgccttccaaagcccttccttgccgccaaaataataattggcggaggcgatgttgacggatgcctgctgggaaatcatgcgcatggaagtgcctgtatagccgtgctcggcaaacaggcactccgccgcgtccagcaatcgttccttggttcctttctgtcgtttcatggggggtgggggaagtttggaattatcggtcaacgcgggcggcgcggacctggatggaatggttgtgggcgtccagcccctccactctggcgaactccgccacgtacggagcggacttgagcacggcctcccggttcatccgcaccacgctggtgcgccgctggaactggtccgcccgcaggccggaaaacgacttgccggccccgccggtcggcagggtgtggctggggcctgccaggaaatccccgcaggccaccgtggaaaaagcgccggcataaatggcgcccgccgtccggatgccgtccagcacggcgtcttcatcccgcgtgacgagcaccagatgctccggagcgaaggcgttcaccaggtccaccccctcctggatggaggaaaccagaaaaccgtaagcgtgcttgtccagcacctcccggatgatggaaccgcggctcagcagggcggcctggcgttccacctccgcttccacttgttccaataacgcctccgacgtggtaacgaacaccaccacgctgtccggaccgtgttccccctgcgccagcaggtcggcggccaggaactccgcgtctgcggtctcatccgccagcaccatcacctcactgggtccggggagcaggtcgatggcgacggctcccaccagctggcgcttggcctccaccacaaaacggttgccggggccgaaaatcttctcaaccggcttcacgctctccgttcccaccgcaagggcggcaatcgcctgcgctccgcctatcttgacaatctccgtagcgccggaagccttcaatgcatataaaagagcgggattcacccgcccgtccggcccgcagggcgtagcggccacaatctcccgcacgccggcggcctgggcaaaaccgcccgtcatgatggacgtggacaccaggggagccttcccgcctggaatataaatgcccacgcggtcatacggaaggaagcgttccgccacctccacaccctgggcgttcacgccggaccagtcctgcctgcggctgcggtctgaaaaataatggatgttggccagggaggcggcaatggcctctttcacggaatcctccacggcggcttccgcccccgccagctccgcctccgtcacgaacagggaggaaggatccagatgcaccctgtcaaacctggcggcataatcaaaaagggcctcgtccccgcgcgcggaaacgtcctggataatagcgttaacggtatcccttacggaatcctccgggagagcgcggcggttcatccggctcttcatttcgtcaaagcaggtgtcggaaggacggtaatttttcataaaagatataatacggaaaaatgagaaggaagtttcacaatctttaagcatgcagtcaagccttctgtcctctttgatttccaaaggcactccatgaatctcccggacaaaaaatcaaaagaccaaaccattctcccttgaccggcacaaaaaacaggcatagcctttctttcgcaaacatttggccgaacggcccactgtcatgaacattcacgaatatcaagcaaaacaactctttgagcgctttggcgtggctacccccaggggcattgccgccgccactgctcaggaagcagcacaaatagcccggaacatgggcgtttcccaatacgtagttaaggcacaggtacacgctggcggccgtggcaaaggcaccttcaaaaacggcttcaagggcggcgtgcacgtcgttgactccgtggaggaagtggaagacgtagccggcaagatgctcaaccaggttctggtcaccaagcaaaccggggaaaccggcaagctggtcagcaagatcatggtggcggaagccgtggacctgaagaaggaatgctacttcgccattctccaggaccgcgcccgtgaatgccccgtcatcgtagccagcacggaaggcggcatggacattgaagaagtggccgccacccgtccggaagccatcatccgcgaacacattgatccggccctgggcatcctgcccttccaggccctcaagatcgccgtggccctgggcctgaccggccccctgctccgccaggccaccaagctcatcaccaacgtttacaagctcttcaccgccctggactgctccctggtggaaatcaaccccctcgtggtcaccacggacgaccgcgtgtgcgccctggacgccaaattcaactttgacgacaacgccctgtaccgccacccggaaatcatggaaatgcgggatgaaacggaagaagacccccgtgaagtggaagccggcaaatatgacctgaactacatcggcctggacggcaacatcggctgcatggtaaacggcgccgggctggccatggccacgatggacatcatcaaatactacggcggcgaacccgccaacttcctggacgtgggcggctccgccacagaggaaatggtaaccaacgcgttccgcatcctcaccagcgacaagaatgtgaaggcacttctggtcaacatcttcggcggcatcatgcgctgcgacgtcatcgcccagggcattgtggccgcggcgaaaaacattgacatgaaaatcccgctcgtcgtccgcctggaaggcaccaacgtggaaatcggcaagaaaatcctcgcagacagcggcatcgccatcatccctgccgacaacctggacgaagccgcccagaaggcggttgcagcagtcaaataaccctcactatttattacgacaatgacatctctcattgacaaaaacacccgtctggttgtgcaaggcatcaccggcagcgccggcgcgttccacgccaaaaactgcatggacttcggcaccaacgtggtcgccggcgtgacccccggcaagggcggccagctctttgaaggcaaggtccccgtcttcgacaccgtggcggaagccaaaaaagccacggactgcaacgcctccatgatctttgtgccgccgcccttcgccgcggacgccatcatggaagccgcagacgcgggcgtgaagctcatcgtctgcatcacggaaggcatcccggtgcaggacatgcagaaggtgaaagccttcctgaaggacaaggacgtgaccctcatcggcccgaactgccccggcatcgtcaaccccgccgccaactgcaagatcggcatcatgccggcctacatcttcaagcccggcagaatcggcatcgtctcccgttccggcacgctcacctatgaagccgtctggcaggtcaccaacatgggcctgggccagagcatgtgcatcggtatcggcggcgaccccgtccacggcatgacccagcagcaggccgttcaattcttcacggaagaccccaatacggacgccttcatcatgatcggtgaaatcggcggttccgaagaggaagaagccgctgaatggatcaagaacaactgcaaaaagcccgtcgccgccttcatcgcgggcgccacggctcccaagggccgccgcatgggccacgcaggcgccatcgtggccggaggcaaaggcaccgccgccgccaagcaggaagccctgaaggaagccggcatcgtggtcgccaagacgcccgcccagatgggcgccgccctggcggaagccatgaaaaacaagggaatgtaagccctcatttacacactcccaatcaaatcctaaagcgcctcctgttcaggaggcgctttttctttgaaggacacggcatcaatcccatgatgctgattggacctggatataagaagacagacatctttcaggtatctaaacaggagaagctttctagtaatgcacagaaacattcctattatgtattttccatattacaaattcacttatataataattataataaatatcattattaaaaattaaatcatttttctttacaaaagattcaatttaaaatacgtattttagcatatttatgaaatatctctctcatcttgtttgctttttaggaattctgtacagttgcaacaatttattagcaaacgataataatgacgatcttgaagaaacggagcaagaagcttctgcttctcttaagatcaaatctcaaacacaattatgttcagcagattattatattaagaaaggactagataaggaagaagatcgaaaaagaacagatatcggtatcggagaaaaaatcacatttttacttgttggaaaacctaaaggcgacatcaaggaacttacttggaatattaaaggaaacggcttcgaagaaacaaaggccgacttattaaaaggatcacaaaagattagtctaattgcaaaaaaatcattaacaaaagatacgaacgttcaaattgttgcccaaaccagtgaagggaaggaagcaaagatttcaattaatatcaaagttcctacaaagatagaggcaaagaaatttagtggagaaattgaaacagaagatggcaacgataaagttgataccaaaaaaattaaattcccgaaaggaaagtatggtctcataggattcattgaattaaccttattgcccactaatgtaagttttaaaaaaattaacgctgttgagcgagacggaggtcttgaatggcctgagagagacaataattcaaaaaaaccggtactagcatcagcacatacaggacacggagttaataaaattgttagaataagagataaaaataatctttatgacatggttgctgagacaggagatacagtagttaaccttaacgcaattcgcaagtcgggagtgaatccacaaaatttctggtggatatgtaaaaaatatattaatttaaaagaagaaaataaagataccatttcattagggaaaacaaaccaaatattcaatatagaagcaataaaaatgtctataactataactattgtaaaatttggattagaatttaaaagaaactctgatgaaggtgaaattttatgaaagtactatcatttatgtatatatctatcattagtctactcatttcgttgtgtcctattgttatggctgattcttctctgaaaagtcctgcctgcttagatcaatttaaacaaccatctgccactatccagaaactttcggatttgctagaatatcagcattttaaatccttttataaaaatgccgaaaaacatacatttaccttcggtttaacgacgcaaaataatattaatactgaattgagcgacaaaatatggcattgttatcttgtcgcctcagctccgttattttcctttaaaacatatcagaaaaccgaaccggaagttgagattgatgaaatggccgatatcaatcaaaaatccgagatttgtctattcctcgataaatatataagacttattaaggattcgaatgatatgaaagaatcttctaaaaaacagattatccatcatatatttttgccttattatgcaaaaatattaaaacaattcaaagaatcaaaagaacataatccctacagaatcacggaatataaagaaacaaacggagaatctaaaaacttaaaagaaaataaaactatttatattgaatctcaagaacaaatttcagagctttggaatcttctcaacgaagttgctgatggtgaatcatttattaactctagaaatcaagtaatcgaagacgaaactaaagacctggaaaaatcttttatggaaattcttgtttccatctttcctggtaaatattccaaagtcgaagagttccttcttcaagccggctataccaaagaggaaattcctaatttgattgatcgcaccgtcggcaggaacaataaaactgactttctctacaaaggaaagcatcgccttgcacatgaccggctccttaagaaaaagaaataacttctctctttccgaaacaatgcattgccgcaagcacacaaagaacattcacaaacggacatgaaatatccgtcatcttaggacattcctacaagcacagttttaatgcagcaattgccgccacggcagtacatgtactcaaggaacagggccacaccatccgctttcatgacctctgccgggagcactccaaccccgttcggccggacatggaactggtcagcgacatcccgggaaaacgcctggacagctctccatcagccggaaaccagggaagttgacggcattgtcatcatccatcctaactggtggggacagccccggcttttaaagactgcatcttcgctttctgcggcgtgcatgtttttgaaagaaaaatgttctgcatccttgtagccagcactccggacatccgtgccaaatgacttgacgaagtgcgggaaacggtatgcaccctctttcccccctgagagagaaccccggtaagagcccgcttcgtgccaagatgagcgagcatgggaattcatgaaagccacggactactcccctaccgtaaacccggcgggaaggaaactagtttccctttaaagcaattacggccaaattgattttcatactcccccgttaggaaggatttcccttaaggaagtccttccggatatcgatccttgataagctttggcaaagggaaagatacaacgtaaatgccgccaaggagcaaatccacatacctcagtggatggcacaactcaatcttgagacgtggcatgtaatacagcactttttctcctcgtcattgcaaatgatccctctcagagaaaaaagcttttctttccctacgtcaaaaaagtcaagaagataaataagaatctttccctgatttttaaacataaaactggccaaagcatccggagacagggtcctcccaccgttctccctgcatggaaagtgcaatgggactatccggaacaaccctgttttttccgcttgtcccataccacaggaacggtgttccgctcccgtaagagaagacaaggtaaaatgcccacaataaaaaagaatggttttcataaagaggatacattatccatttttaataaaagcttcacagagaaaatcaatcaataaaaaaccatattcgctgcagcaaataatggaaagggacagcatcgccattttttaatcctcccccattaataatttcagaacaatcaggcttctttcatgctcacctcattccccggccttgccattcatacgctggaagaactccggcagagatagcttgctgaactgtatctccatgcaactctcccttgccagtttctaaaccagtgcagccaggcatttgactaaaaggcaaatgatcctttctctcttcttgcaacacctgccaaaaaagcaaaaaagagcctgtatcgttaaaatacagactcttaagaagaaaaatgttttggcggagcgggagggattcgaaccctcggtaccggttttgccagtacgttcctttagcaaaggagtgctttcagcctctcagccaccgctccgtcttgggtaatgtgtggagaagaaactacacacttcccaaaatgaagtcaatacataaatagtacaggcaggaattactccaggcaggcatattggcaggtcagttccttttcttcaccgggcttcagcgccacctcccactggaatttcccgtccggattcaagagacggacaaacgtcctcccaacataaaatcaaccggaagccgtttttcacctgcaaatgtaaccccgcaggaacattcagcggccggaccatgggaaaacaagggccatcagttcccccacggcggcgcggacatggagcaagcggtccggaaaacctttttaaacctcgcaatgctctgcgatcacttccagaaaatcatccagatacttcgcggccttctgctccccgatgccgtggacgttcatggcgccccggcgggtggtgggtttcagcctggccaacccttccagggtggaattgtggaatacggcataagccggaattccggcttcacgggccagctcattcctgagctccttcaatttcaaaaacaaatcttcgtcaaactcgcccagcgcggccaaatcccccgtggcccgcaccctggcctgctccgtgggagcggaagccttttcccggcgggcaaagggccagagcatggacgcctccctgcgccccatcatcacttcattccccttcgggctcagggtaatcagggggcggtccgcctctccgctcattctggtcaaccccgccatttgcatggcgcggaacaactggcggatatcgtcctcgctccaccgggaaaggattccatacgtacttaaccgggccagggaggtttttaaaatctcctgattcttcgcccccttgagcatctggatgattttcgtcctgccccaccttccctgccaggaaccgtccgccatgcgcacggacgcgcgcgcaatcccgctcagcgcctgccggacaaccctggtttcctcctcgcccaacgattggccttcctccacccccagcgtcaggcactggtcgcagcggccgcacggggcgccatcctcctccccgaagtaattcaaaatccactgctggcggcagccggtggaataagcgaactccgttaccgccttcagtttttcccggtcccttacctctttttcccgcagggcctgttcgtccagaggaatcttcaagccgcttacggcggggtccgtcactctggtaagcttcacgcgctgccccggaacgtcatggcggctgatcgcgccattgcgcatgagaacggacagggcggcccccacctgcatggcattccggcatttgaggcgttcccccatctcctccatggaccacgccacatcatgggtttccggactgcaatgcttccttaacaactcgtacagttccacaatcagcggaacgcccggattcaccccctcaataaaaaactcctgggtccgcaaatccgcgtggttgaacaaaagctcgcaataggcttcatccccgtcgcggccggcacggccagcttcctggtaataggcctccacactgccgggaacctcaaaatgggccacaaacctgacgtcggcacggtcaatgcccatgccaaacgcattcgtggcaatgacgatgtccgcatggcggttcatgaaggcgttctgggcctcttcccgctgctcatccgtcatgcccgcgtggtaagccgtcacgttcaggccaaggtcggaaagagcctcatacacctgctccacctttttgcgggtggagcaatagataatacccgtcttatggcgcttcaccagctcgtacagcctcttgtacttgtccttgtgcgtatcgcaagccgtaatgcggaaatgcaggttttcccgcgcaaacccccgtacaatcgtcaccgggtcgtccagcctcaaatgttccagaatatcctcccgcacgcggggagtggccgtggcggtcagagccgctacctgcgggcgccccatcgcttcaatagccctgcccagcttcaaataatccggacggaaatcatgcccccactggctcaggcagtgagcctcatccacggcaaccatattcacgtccacctccgccagagcacgcatgaacccctcatggccgaaacgctccggagccacatacaccagcttgaacaccccgtccttcatgccggccaggcgttccctttgttcaggaaagctcagggagctgttgatcatggtggcgggaatccctctggcggcaagggcgtccacctggtctttcatcagggcgatcaacgggctgaccaccaggcagaccccgtcccggcacaaggcgggaagctggtagcacagggatttccctcccccggtgggcatcaccaccagcacgttgcggccttccatgatggaagccaccacgcggtcctgcccctccctcaaactggaaaagccgaagtactccttcaatgcctccatcggcgacctgatcaccttgaactcgctcattttctccgctcagtgtgccacagcccattccgtgacgcaacgcctttcccctctttctgcgctccggaatcaacggcctgtctttgaaggactcctctcccgggaagagaaaaaatgagatttttttctcaaatcatcttacaaacatcttgactttcccgaagaaaaacctatattcctttcaccgcttacgcggtacacgacgcaagtcaaagcgcccgtagctcaattggatagagcgtctgactacggatcagaaggtttggggttcgaatccctacgggcgtgccacttgcatcaccaccggtaaataaaataattcctgcctgaacgccatggcgggattttttgtctctatcggtaaatacatatgggggcgccatggtttcgactggaagtctgaggtgctggctgcatgtgaaggttaatcggctggccttctaaaaagccgattaaaaaaataaatgcagagtctaacgaccttgctctggctgcctaattagttcagccgcgtcagaacctcaacgcctgctagagggaacgacgaatattcagcaggctggtgcaatgcggggttgccgcgcaacgcacgagacttccacaggcaactagcgagcctgcctagttggcgcatgacgaagcggccgcgaaagcagcaatatgcgtctgaacatggagatgccggcatcaacggccttcaggacacgggttcgactcccgtcgcctccaccatctcaaaacaaccgcaagcgtttgaaaaagaatgcttgcggtttttgtttttataaaactgcaagacaaactgcaagacattgaaattcgttttggaaacaatgtcttgcagtcggaggtgtgtcttgcaggcatgaagaagccctcccctgtggtgggcgggagagggcttcggggggactgttccctgattcggaacaggggcatttgcatggttgctggaaggtcacgagagaccgacgagtcggttgtatttgcggttggctctccgggattggaaaagaagccgcattccaccagcatggcgggcggcaccgtttcacggagggtgcggaggctggatttggagaaccagcaggagcttgcagagcggctcagcgatagggatgaagccaaggcttttactctcagcgaatccgtataggcgccgtcatcatggtagctacggcagtagcagatgcgagccccttgggccgtagggggagtccgaggagtcagagcgaacggagagtatatgccgtagttccccgcgttgatggccttcacggtggcggacaaggtcgtcgccgctcaaacgggggagtcggtgacggtgacggcgcgcccgtggacccgcagcatgggggccagatgaccagcaatggtcttggccacagcgtattcttcacgcccgtttccacgggcgcccgtgttgttggcgtgtccgatgtctaaagcgatattcattttccgatatgccgttcaagttgcaagagcctcatgttgatttgtgtgagggccttcgtccgcgcatccatgcaggcgcgcatgccgtggtacgggaagccacgggcaataaagcccacgaacatgacccattcgggcttatacccccttaaaaggttcaggcagcgtgggctttagtgcacatggtcttactttttcaggatattgaacgacgggcagcgtgaacctgggagcgggagatatgcccctgcttaatgaccaggcaggagccgcttttgcaaacctccgtgcggtcctgggtaaagtccacattatgtccgcaaccgcccagcagggcggaggctgcataggccgcccctgccagggtcacccacagaaggcgttcccaccatttcaggccggttttagacttgctttttccgtaggcatttttcatgccctgcttccccgccgtcaaggacggcccttttttgctcaccatttaacttgcgcatgattttactctacgaagtatttgaagaacgccacggcagcagggtcctggatggcgaattccgggtagtcacaagaggtaaatgtccggcgtcctccctggtcattaataacctccacggtcaggcagacgctcccaccagatgcaggctcatcaggatgccggacaagattgacgtattcatccagacgcgcccacacctggacggctttccatggttccgccagccctaccagagcggtcacgacggcctccattgccggggcttggtcagcgggcaggtcctcctgcttgtagcggtcagtacgggtatagccgtccgcgtcccggtaaatggccgtcagggtgaagtccccccattgtccaggctgggggaattgtatctgtatttctgcgttattcatattatgctaagggggtgttaatatctacaaagtcttcagttacttcagaaacaatggtgttcgcagctattgcaccgagagccattgcaaccgggttgatgttatttggctgataaagcgtgcgctctgtagagccaatctctacaaccgcagtcccactatcgactttcgctaaatccacatagcaagaactgaatccaaacgaagtttcaaaggaccgaagcccacgaacggcagcgattttgcacagggaggcttgctgactgccgcccagcatcagatagagagagccaacgccatcataatctttggaataagaagccggttggctttgctgatagatgattttattaagcgtagctggaatcagctcattatggcttgctggaacaaagctggtagtggttttaactttccatttttgtgtcgttatttccgcataaatttcccgcactataatagtgtaaccattgcgaacggtatccctgactgcatcgaacgtaatatccagaatttctccatttgcataagcgaggtcattgccgggaatgagagcataggagtccagagttaaatcgcttctgtaggttttggctccagcccccagcccaatagtgaatttaagagcagtgtagctatgcagggatatagaaaaccccgcaaagttgctgtagttccacccgccgtagagtcccagaaagggaaacttgatggagctggttttatttgcaggcgccgtaacgcgcgcataatggtaaggaacatatatggcggtgactgctgagccagtagtcacaatttttgaagtgtcaggaaaataaggcatcgtgtagacattcgtagccccggccagccctgctgcatataagcggttcacggctgccgtgcctgtttgcgctcccacggtaagcggaatattgatgcccccgttggcgttgaccgtcccctccgcagtcaagccgccgtccagcgtcatgttgcccgcttcgtctgtcagcttgtcctgcttgccattccacgtttcgcgttcttgaaccgttatgtgggctgcggcgtcttccttgtgcgcattgaaggaagacgcgtcgacttttgtagaaagagcggcggcatccgccttggcgttccatgcggtgcgctcttcctctgtaacatgcgcagtttcattctccacatgctcactccattcattcagaggagtcaggagaatcccattgatagaagtaattttattcatgcttgttattctttgttattgcttgtcgtgaagcggttgaacaacgccactgccatcccgtccaccatcgtgaactccgaaaattctggctggtgaaaaacccgcgcccttcctgggcggtggctgcttccacggtcagagcaaccgcatccctggattccagagatatttccctttcctccaaaggcgagctgatgatctgatccagccgcacccggacgtgaagctccttccattcatcggataaaacggcaacgtgtgctaccacttcgttgaaagtttctacctgttcctggaaaatatcatcctgtgaaaagcgtcgagactgaacgaagccgttcctgtccgggaatacggccgtcaggataatcttcctatagaagttgaagtgtccctgcccctacctcccacgcgccacgattgcagagccggcggatatgttagccgttaatgcaagcatggtaagcggaaaaacatttggggcgcttcctttttacatgggccgcctggttgcttcatggagaaacctagcatccttcttcctgttgaagcacaccggagcaagaaccaaatttccatttgcctggtttccctttccctctttttcctcgtagaaaggcccttataggcctgttaaagcaaatccaactcggcaacagccgctttacgtgctccctcggcaccctttttaacgctgaatttgacaaatctagcttcaacgggaacaaaattgacctcctgttccaccgggttgttgacgatattgccgaaacggccggaagccaccggctttccccatgttttgccgtccctgctgagacggatatcatacatttcaatatggcccgggccgccttccatcacaggcgtataaatcaacccggcaattttctgcacttttcccgtatcaataacaatgtcgcatccctggggaggcaggccaatttccacataagtatccgtttttccgtctttcagccgctccaactgggccgcgggaaggtttttcccggcaacggttattttccattccttcctgttcagtttccggacggcttccacgttgtcctccgttgagaaaggagccaggtaatacaacgagaaattgctgaatgaaacggatttgcgggaatccaggaagcgtatcctcaattgatcagccttcaccgccttcggcagcctgatcattttacggaatccgatggtggtactttcagccaagggtttccactggccgtccagccacgcatccacggcaaagcgctccacacgctggccatagtcacgtacgttttcctgtagcttgatgacgttgaactcctgttttccagacaatcggatttctacctccgcccgggtggtgccatcaggagtggcccagcctgtaaaggggctgccgtcaaacaaaagcccggattccggatttccggcccacccggaaagagctctcgcccgggctcccctggccaagtcattttttttcatctttccaatcaccctgccaaattggatcatcctcctggcgtccgcctccggaatgattccttccttattgggagagaagttgggaagaacgttggagttttgtcccacggttgaaaagtaacagtccaccaggtaatcaagagatttgatggttttgtcgtcgcgttcatggtaaaaccagcctctccgtatggggaggcctgcacgtgaagggtaccagacgagccgctttttccctgccaggctgtcaatggagcccagattcctgtctttagcccgaatccccacatcatttccgccaaacaggcgcgacgaggccgtaatcccctggacgcaccattccgtttcccgtccgcgccccatctcgtttcctccccaccggacatcgggagccgccccggaaagcagaacgtccggctgcaattccctggcctttttaaagatcctctcccagtcgaagggagtctgtttcccattgactttgctatccaccccggctccgtcaaaccatagaagataaacaggaccgtaattggtcagcagctcttccagttgtttgacgtagaaatcattgtacttttccgtcccaaagcttttttcatgcatgtcccacggggaaaggtagatgcagaatttcatgtccagttcccggcaggccgcggaaacttcccggatcaggtctccttttcctcccttgtagggagaacgggaaatgttgtgatctgtccatttggtgggccacatgcagaatccgtcatgatgcttcgctacaaagatcactcccgttacgccggcatccttgaacgtttttatccaggaacgggcgtccagccgggaaggattgaaaattgcaggctcctcctttcctgttccccattccgctccggtaaacgtgttcatgccgaaatggatgaaacccagcatttcccgctgctggtaatccagttgccgcgcggaaggccttaccttgaccgccatctccaccagctctccgcgggaagcctgttccggaaccatgacggacacgccttcctttccttttccacacgcgacagccggataccccagcaaaccacagagcaacacgacgcgaagttgaataaaggcagtcatttttttaaatcaataagggggattttttagtcgtatattgataatactctgttaacaataatattctttcatctccctccgggccattccatcatccgggctgaaatgggcatgtcttctggcatccagacggcggcggttccgcacggggttgccgtcaaagattgcccgggaacgtgcaggcctcagtacgtcatttgacgaatgccggaggcccttcggaattggaatctcaaattgccgttcgaataaaaactccactctgaatgaagccatgaagcgagccgccagaaaaggtttgtccattggaagaagggatattgagcgcggcaaaggagaaatgggaagacctctaaagagggggctcattgatggaagcggaccgggaaaaggcggcggcaactatctccttttcctgcccgtcagccaccggttttctccgcttttgggcaaagatcaggtattcccagccggggtaatgccggaccacccatcggtgaagaaagaatgctcccgcaaatatcagaaccgtcgcaaccatggcggaaggtactccctccggcagaattcttgacaggagcggcatcaagtagggcaggatcaggcaatgaatggcataaatgaagaagaagaggggagcgcatgcccgcgcgatgttaagaaaaaacgtcttttccgtcagcagaacgcacagggagcccaatcccagaatccctggaatccagcaaggtatggtgtgcagggtttccgtggagatggcgccgcaatggttcatccacgctattgccgcccacacgggaagggaaatataagctgtttttttcaggaacagcttaatctcgcccagcgtcagggaggaaaggcagaaccccagcatgaaaaaggccagggcgtccgcccacggaacccggggagggtcggaaaacagcgcgttgagctccggaaacagcaccacggagaagagaacggcaatcgtcgcgggaatcagcagcttcctttttccgagggcgaataaaagcggagagagcaggctcagcgccatcacgtatttcaggaaccacagggggccgtcgtaagggaaggtggttcccactcccgtcagcttccagggcaggctgctccagtcccatgtgcttgaatggcccaggcttaaataaatccaatgcctgaagaacgcttccagaaaagccgccccgttccatgccagatagaacaggacatacctgcacggggaatggcgccagtcgaatattttcctgcgtcccacaaagtaggccgccgccatgaacagaaagggcacccgctggaagaagagagggaatcccacaccgtttcccgcagcatgaaaaaggacgatgaagaacaggccaaccaccctgcccaggtcaagccagcattccctcggcggcgttccgggagcagccccgggacgggaggactgttccttttccggcttcgtgtccggagagtattcttaaaccatggacattttcattccggcaaaaaaaatcagaaggggcttttgcaatacggctccacagccctcatgccgtcatgaagacgcaccgcctcatccctgtcctcccgggaagcgaacaggtacagggcatatccgccgaacccgcctcccaggtatttcttcgccagttccttccccagggctagaaggggagccatcccctcctggagctgcacgctatggtacagcgccactccagcagccagttcatgagtgctgcgctccatcactccggcgcgggcgatcagggaagactgggcgatgcgggcatagtccctgcacccgtcagccattcccggcgtatcatggtcgtgcccggtgtggaagaccgccattttcccggccagaaagtcaccggtgctcttgatgtccagcacgggaacggtgccggaacgccagacgcacagccccgtttccgcaatcacggccggatcctgccagccaacccccagggcaagttccgactggacggagtccctgccctgcagcatggcccaggctccgctgcctcccagtccggaccggagttcatagggccagtggtccagggatacaaacggactgatggcacagttgacaatgtacgccccctgccgcgcatgcctgggaacgtccagccagccccccgcaaagtccacgcgcaggggaacgctaagcggggccttgattctgttcaccagctgggtggtggaaatctgttcggaacagggaggcgttttgggaagcactacataccgcgctccaattcttgcgcacagttcccttttaaggtcgccgtaacagtcatcttccgtaacagccaggatatcgggccgttctttcaggaaaacgtgttcaaaatccattccaggctccagatgttctccgcagaccaccttgtccaccatgcacaggctttccagaattacttttttatggccgtccggaatggatggttttctgcgcttgcttttccagagcacctgctcggaagcgaaggagacgatgaggaaatcccccagcgaacgcgcttcacggaagaactggatatgcccggcatgaatgatatcgtaaaaaccggagacgaatattttggtagccatcgttgaaatgtattaaggtgtggatgttgctgtatggagaggggtaaagattaaaccggagcggcggaaaccgctgaatgggagaaaccctcctcccattccagggctattgtttccaattcccggttcccttccacatagtcctcaaagagaaccggatattgcggcagaagcagcgggaggtcctccggaacgttgatttgatgccgtcttcccagttttttccttgccaggcactggagttcgcaaaaagccatcggcaccaggctggcattggagggcaggttccagaacccggcatcgtcgctcacaatgacgaatttcctgccttcttccctgccccaggccgccagcaggtcccccatgttgccgggaagccggccgaaacatgagaccagcgtgcagggaagagagggcgtctttcctcccattccggaggcggcagccggcttggccgccttttgccgttgtttttcacggataaaaatccagggcagaacagagattattttccagcagcgtttcatttgcttgcggggttcactgaaaatgcggtagagaaattccagcctgcagtccaccatccaggcaggggcccttctgatattccgtccggaggcgaagttaaagacggctcccacggccaccataaccccccgttgaagatgggggcacagcctgttcatgaatatttcctgcttgggagcgcccagtgaaacccagacgatgtccggcaggtattcattgattcgcccggcaatagccgcgtagtcaaattcatccacagggcagaacggcaattcctgaaaaggcatgtgcttcacgcggggatcttcccgttccagggtccggcgcagggcatccagcgtctcgcggctgcctcccaggaacatcattctgtattttttcatgccgatggcgtcgctgaaaatctgggcgccgcagtattggggcctgtccgcatgcagcagccatttcaggtagacgggcacccagccgctgtcgcaaatggtcaggagcgctccattcagcacattcctgtattcccggttgcgctgtacctcggaaagcacatggccgtccgccacgcagatgtatccggcgcccccggagcggagcacttcgtccatgcgccggaaaacgcgttcacggtcaaattcgtatctgatgttgaaataggtctccatatggttttcactcatggtcaatgttggtgggccttcaaaacttcgcggtaaatgccggccatcctttccgccttgcggttccagtccagctccccctgcctggcgagaaaagctccatccatctcccgcaggacctgcctgtgatggaaaaagaagcggatgcgttccgcaaagtcccgggcggaccgtccaggatttgacaaaggaattttgcacccgacggaatcatcaataacggtgctcattccgcatgtgtcaaaacacagcacaggcagccgggccatcaaggattccgcgatcacggtagaggtcgcctccataatgctggtaaagaaaaagagatcgctctgccgcatcatggacagaatttccgcattgggcacaattccatgccatatgcacatatgagaaactcccagattttcagcctgttttataaaccgccccccctcttcggaagatttcacgccacatatatggagacgcaatccctcacagtccttcaacagggcaagcgtggaaacagccagatgaagctgtttccggaaatccgccttgcccacccacaaaaggctgaattcttcctttttatccagcaggcgccccccggagagattgggcctgcaaccggtttcattaatcaccacggcctgtttcccataaacttcttccattctgtttttcacgccttccaccgcggcaacaaggacggaggacctggcgaccgcccgccgtacatggggctgccatcttgactggaaggaattaagggcatttttcacccgcacgaacaggcactgcctccatcccgcacagcgtgcataggcggcaggcacgttttccatgcctcccaccggtccccacacatagggcacacccttgattttccaaagcaggcccggttccctgaacccaatcatgttcagctggtggatcagatcaatacggttatccttcatgatttgacgcgccaggcagagagccctcttttgccatttcctgtaatggtagtaaaaacgccagtctccctggttccagcacatccggcgaaccttttccggcacgggaagataatggaacacgatgttggtgccctgggggaggcgggcgagctcccgttctatgttctccctccattccccttccgtaatcacatgcaccttgcagtgcatggccaggtggatgacccagttccaccccatgccgggttcgctgccccagtccgggttgacggcataagcgttaatcaggatttgcatcatggtttgtctatttgatggaatcaaggtagctccggtgcctttcctcctcctccggggcggcaaagcggcggcggatgaccctggccggattgccgcccaccacggtcatgggcggcacgtctccggtcacgacggcgcctgccgctacaatggccccgtctcccacgcaaacgccgcccagaatgacggctccatggccaatccacacgtcgctgccgatgaccgtcatgccgtcctcccagttccggggagaatcccagatggcgcaaccgggcctgttaaaggaatggtccctttttccgatgaatgaaacgcgggcggcgcacaacacgctgtttccaaagcgtatatcgcaggaaacatggcagtgcggccccaattgcaccctgttcccgaaaatgatccgtttgtgaggggaattcagatgcacatgccttcctatcctggtcattccctccacggtgacccagcgttgaagcaggcggaaccgtatgaaactgcgcattccgttagccagggaacgcaggaacaggattggccgggacctgcccggggcggcattggcggaagcattcatcgtacaatatgttccatgagatggttgacgtattcccggaatccggcaggcatcaggcattctttcaggcgcggagaggaaggactgccgctgcggtccaggcaggtttcccggagaagagaggccagccccctttcatcttccggatcaaacaattccccgttccagccccggcggaccaggcaggcggagccgcagcgcccggaaaccaggcagaagcacccggcggccagcgcatcattgacaaccgccccaaacggttccaccaggctgggcagaacaaaaacgtcggccagattgtaccaggccgccaggcgctcgccttccagccagccggtaaaaatggcgctgacctccagccggacggccaaatcctgcaattccggtcccaggcttcccgaccccgctattaccagaacggcgtcctccggaagggccgcagccgccctgaccaggcattccagattcttctccggggccaggcgccccacatacaggaccacccgttttccgcgcaggccgtattcccgctgcatggaatggctcatggaaagcgcttcccggcattgttcccggaatgcccgttcatccctgacaatcggaaaaaagacgccctttccataatgttcccggtaccagcagcatgcctccatgtccgggagaatcacatcgtccatcatcggcatcgccgccttccgcgccagcgcatgcatgcgggacaattcatttccgcggatcatgtccatgctgtcgtcgcaaatgctgacgattttgaatttccagcggcagaccgcgcgcagcaggcatacctccagagccagaatggaaaactccggaacgatcaccagatcgggccgtccctgccgcagaatgcgcgcaaggccggagggaacgcgccgcccggccacgcgaacatggttcaggtattgggggcggaaagcgcagcgggcttccatttcccgcctgttgtagtggtggtccggagaattttcatattcaaaaaacgcctccatctctccaagacgggccagcgcattgaaaaaatcaatgcggtaaggcgccaggtattgatgaaagaccatcagtttccgtttgttgccgttcatggttcagtgccttttcctgtaatattgccgcgcttgcctgaagaacccggaggccgtctcccggacgcccgcacaccggagggaaaaccgcaaggggtgttgaactgtgccgcacagctccagcagttcttcatcggaatattggaaaaggcggcttaaacagcatttgaggaaggggattccgtggcggcgggaacggaagggaatgacgtgcaccccccggcagccgcccagaagctccctttgccggcggtcaatgggagaaaacagggaatggaaataataaacgggggtccccgcatgcagaaagggggccaggcggtaaaaaggcgcccgttccgggtcgttcccgtaccgtaccagcaggggattgattctggcggcatcttccatttccgtttccggcgcaaggtcaaaatagccgttgaaggagaaaacgcgttccgcatgcagcagggagccgaagagaacggcggcatagcctcccgaggaactgcccaccatcgttgcccggcagcctttcgtttcgttttcaagccacttcagcaccttttccggagagttcaggcggatgttgatgccgcccaggtaccattgcttgaaaacgtcgcggatgaagatgtgcctgccgcagcccggaaccctggttccgaaccattcaaacgtattccgcagggtgacccgttcatggaaccggacgcggttgttgggaaagtacaggtcgttgctgctgaaataaacggcgcaccgcgaatcatccccttccggagaacgctccatgagataattatcgcgggtcctgtacgtctccagcacctcttcgtcatccgtctggaaaacccagtctatttcgttgctgtccataagaaggggagaaaaactcttacatgcatgcagatcatggccttgcacgcggccagcaggccgtcgtgcctgcggacgtagtggaagtaatacctgggctgggcattccccagcggggaatacaaattgcggagcctgcctgccaggggcaccttccggtccgtccaggcaacggccttgtcatgccgttcgcaggttcccaggcaggcgggagccacccgcagctttattccgcgttcgcgtgccgtacgggaataatcgtaatcccccagcgcgtgcaggtagaacccgtccagaatgccgatgcgctccaccacccgccgcggcacccacagaatgttcccgtggcataattcgcactccctcagggttccatccggaataacgggcttcccgcccgccgtgcctccataagtccactcatccgtgccgggatggcaggtggagccgcagatgacggcggcgtgttccatctggcggcaggcttccaatagatggcttacggcaaacggatgaagcatggtatcatcattcagccacaggtagaaatccgcatccttcttcagggcgtcctcccatgccgtcctcattccccggttccagaacagggttccgtcccccgtgatgacggaaacggagggataagcctgccgcacggcgtctccggtgccgtctgtggaaccgtcatccaccaaatgcacggagacgtccagccccgcttccggcagtgcggagaacagggaggcaagggagcggagcgttttttccctgcggttgtggcacgtcatcaggaccgcaagtttttttccggaggtatcgtcagttttcatggaatgcgtacggaagggagagggttggaggaacggcggcggaagatgctttccacccattcatgaagctcgccgtccgtcatggcccggaaacggctggaatagcacatggcgatcatcatccacagggagatgttcatgatatccagattgaagttggtatcctccagccatccccagagccagcggaaggccacgaacactcccagcaatttcatccagcggttgttggagcggtaaatggccagataggaggcctgccagtaaaatcccgtgtaaaggaagagcccaaccacccccgtccaggcgaaaatattgaggagaacgggttcgcaccaggcgcggcgcttctggtcacggtaggactggcgctcatcctgggacatctggaaactggtttcatacccctgcgccggggtgcgccccagcaaaatgcagccgtccttcagggaggaagaggccacctcttcaaagacgatgctgcgggaatccgccagcaggtcgtcctccacggaacttcccggcgctccggcgtaggagccgatgtccaggacattgaagacgccgcccagcccgagggcgagaaagagggagggaattaaaaacagggcgtgccgcatcatcctgtaaaagcagtccttgagcaaatccctgccgcaatagacggccagcagagacaaagccaccagcgcctttagaatctggctcctggctcccatgctgacgcacaccatcaggcatgccatgaccagcaccaccagcttccatttccggggcagcaggggcagccacggcaccagcatcagcaggggattcagcagggaggcgtaaaagtccggattgagggtgaacatgaacaggaaaaaaacggggatgaacaccttgaaccagacggacaggacctgccgcgtcacctccggcaggctgaacacgtaaaccagcacgggaatgaaaagcgtgggggcattcgtcaccagggcccgcgcggaccagtagccgtccacggcgaagacgccccgcaggcagcaaatgaatacccacaggaaataaatggaaaagaggggatagaccggggcgtcctccctcctgaaatacttccgcatgatgacgaaggacaccgccagcaggaggacggaggaaagggaaatggcctgttccgtacaaatcgggtgaaggacggcggcggacgagtacatggacaacatgatcatggccttcaccaggatgatgaaggggagcacgacccggatgcttgaaggaaggcgggatttcccatcaaggggcggcctttcattcgcctgacatgaaagggccgtattacgcatgcgcgctcctttccatcaccggagaagctttcccctcctccgcccggcggatgcggcgcgccggatttcccgcccacacctcattggaagggatggaacgcgttaccacggaacgtgctcccacgacggcgttgtccccgatggaaacgcctttcaaaatgaaggttccggcacccaggaagacgttgttcccaatcctgacgggagcggaccggcgcagaagcctgtcctccgctccccgcctggcttccgggtccaacgcgtggaaatccgtatccatgatgtggactccgaatccggcctttacatcgtctccgatcgtcaccgaccgcgtgcagataatcacggtattgctgatgcccacccggctgccgatgcgcagcacgccgtcccggtccacggaaatcaggcagcgctgggaggaacgggagacgccgtgggggccgttccgcatggtaaattcccttcctatgcggcacggaacggaacggcggcggtttcccctggatatcctgacgtccgaatgccgaacgaacagaggccggggccgtaaaccgcattgccggcatacaggagccacctggcataccaattgtgaaggggatgcaggcagacggcccagcagcggagcacggctttcctggcaagataaatcaattgctgcatgcggccccctcccttccctttccttcatgttcctccgtgccgttccctgcgtctccggcaatgctcccgtagatgcgtttcagttgttccgcattcgcggaacggtcatggctcgccagggaggcctgccttccgcggaaggaaatacgcctgcacagatccatgtccccgaacaggcggcacaccagcatggccagcatttccgtctcttcaaaccggtacaggaaacccgtttccccgtcggacacggaatccatcatccccccggcataagccgcgatgcagggagtgcccaccatctgggcttcccccagtgaattggactcattttcaatcatggagggacaaacgaatacatgcgccttccggaattggctgcacatctgctccgcgtccaggcgtcccagccagcggaagcggtcccggactccaagccgttccatcaggtttcccaaataacgggcgtagccgttcctgcgccacgcagggactgacaggatgtccggtccgaccaccttcaccctggcgtcaggataatgccgcaggaccaggggaagagcctccaccaccttgtggaatcctttcagggggtagtgggactggctgagaaaaatcgtatgcttttcgcacgctccggcatcccattcatgacggtaaaagggttccctgagcgtgggctggagaacatggtaccgcgccgcggggttcatggcccatgcgtgggaacggtcccaggcggtacatcctattacatggcgcaccttgccgaacagctcccgttcgtattttccgcgcgccttgatcttccgctgctgggcaaaaagcgtgtcgcggcgcagcagatcgcggaaggtaacggatttcacgagttcccgggcaggaatgccgcccatatagaacccggcgcagacggaagacagcccctggatggaaacggccgtgcgttccgccccgcaggcctgcacccaggccagggagtgcgggtattcggaaccgcggatatggaccacgtccgggctgaatatatccctgatttcccggaaacagggttccagttccttcctgtaaacccccatgtccgcaggggcgggaaccaggtaataggtcatggcctccccgtccaggcggcgcagggtgcgccccgggtaaaacatgacggcggccagctttaaatccggggcggctttcatcagctcctgcgctcccgcgtacatccagcctcccagaaccggttccggaagcccaagcatccggcacggttcgggaaacaggatattggacagccagagcacgttcatccctttttccggagcgttcatgttcttcaccagtagcaccccccctccacacggctggcgtggcctaccgtctcctctcttcccggcctcgcccacgcgtcattgaaaagccgggaataatcatgtttgggagcgccgggatcggccccgtaggcagggtcttcccagcgtctgccccgcaggccgaacagcagttgaagagccccgccgagatgcacggcctgcctgcccctcctcttggcatgggccgccagatgaaagccgtaagccccgcacccgatgaggcacacatcgtaatcccggcggtccatctccccctccatccatgccagggcttcaaaccagtcggcaaaacggtccggccccgcgcccaggctctggacggcggccagcgtctccagggaaaaggaaggaagaacctccgggttttcaaaaatcctttccctgttccgttcgtattggagcgtgatgctttccgcgaaaggatggaccaccagcaccttccttccctccagggccctgctccatggccgggaagaccagtaaggctccagattcagcaggcgcacgcggggaacgtcccggatcatgggcatcacctcccgttcatacggaagccagcttcccaggatatccagttccatcatgtcacgcagcatcagctcgcagaaacgggccagatactccggcgcggccgggaaaaagccggaccactccctcatctgcctcatgatgtttttattccaccaccactggtccctccggcccgtgatgtagtccagcggattcctgcccgccttcccaatttccagataattatgcaggcaggacatttccgtgcagccaaaccgtcccaccatggcgggacggccggagcggagaaggtcctcaatcatcgcggaagccgcgtccgcatccagttcacaggaaggggggcccagttcctccctgccggaacagcggtcaaacatgcggcgcagcaaatgcaaactctggtgcatcagtgaaatcatggcatggacaagtttaattacctccgcaggcattctcctcccgaaggaagcggcgcttcatggaccggagctccagccggctgcgccacgtcttccagttcctggcggcattcctgattcttgcggagcaagggggcttttcctccggatcaaaaaaacccctcctggaaaaatccatggagatgccgtgccgttcaaacagctccgccaccggcccgtaccatttgccgtggatgatgcccgtgaaaatgtagggaatgatctggtacccctcccgggaaaacaaagtggggtccaccgtcaaaaactccatgcgggaatacttagccctgcggctgccgaagcattcgaacttccatgcggattcttccttcctcaacagggaaagcagcgcctccctgcgccacagggagccctggcagcacgcataccagggataatccgggtcactggtgaaaaggccttcataccgcgaaggctctcgggccggaattccctccggcgtcaactggatgcagggaatttccggatgggcgcgcatctgcgccgcgtatctttccaccgccccgccgtccaccggcgccgtcaggaagtaatcctcctgcatgtacagcaccgtgtccgtttccatggcctccagggcccatttcaggcattcgctccacgtggccctcctgcgccccggaatgatccgccctgcgcaactcctcagggaaatgacgtttttctccggaccggagtaggccttgtactccgtattcaggtacacgcgggcgggacaatcgggccaatagagggaccagagcctgaaaaaaggctcccagcagtcttcaaaggaatcacaggtattgacgagaatggaataggatttcatggaattatttggaaaactgaattttcctccaggcgcttttcaggaaaaaaacaagggtgccgcgctccctgccgtccagagaaaaaaaccagaggaaaaggaggaagacgaccaggagcgagcaggtgcggaacaataccggaacgggagaaagcgacgcatcaatccggcacaggaggatgcccgcggcaaacgtagccgcgctgggaacaaggcacggcgccagcacctggaaagaaaaatcccgcaggctgaggccaagacgccgcacgcagatggaaagggccagcagcccccccggcagggttacgaaaagaatggcggccacatacatcatgcagggaggccatcccatgcggtagaatccccaggtagcgcccaggaaaagaattccggaccccgttttcaccagcgtgtacaggcggatgttcccctccgcgtaaatggcggcccccaggctgaggaaaagctgttccagcaaggttctggcaagctggagcctgcagaacaggaccgcccaggcggggacggaatgaagccagaggcccaggagccccggagcctccagaatcaggggaatggcgaaaaccgccatgagcaggtaggcgaatttgcagccggacagggaggcccgcagcatgaggccgcggttgcccgccccctcgctttttgaaatgaccggattcagggccttcagcatggtcccggaaaaagccatggtttgcccgttgatctgctgggcgacggcctgcgccgcattgagggcaacgccgaaaaagtggttcagaacgatgccgacgccgtattccgacagcatgctgctggcggaaaccgtgaaattccagcccgcaaagcttcccatttcccggaaaacgccgcgtttccagtaacgccgcggcgcaatcacgcactccgcatagttcctgcggcaataaacaagcatggccgtcatggcaaggatggaaatcccggccatcaacaccccgtacagaatcagcttgtccgccagcacatgaacgacaagcagggccgcccccagcttcaggaaagattccagaacgcctatgacggcgaaatacagcatattttcatgggcgttcagcacggcttcacagggaacgcccagaatgccgaacacggtgctggcgatcatggcccagtatacgcacctggcggcaaaaacccggtcctccggaatattgagaacatgcccgaacaggatgggggccgcagcgtacagcaggattccgaccatcacggcaatggcaagatggagcaccacgctgatattaaacacgattttctgtttctccgggtccccttccccctccgcgtagctcatgaagcgctgggtagccgccgccatgctggcgttgagaaaagccagcatggcaatcacgcccgccaccatgttgaaaatgccgaagtcgtccactcccagggcattcaggatcaggcgcgtcgcgtacagggaaacgaacatggtgacgcccattttcatatacaggaatcctgtgttccttatcactctggagacggtgttcatgaaacggtggaagaagaaaataccgggaaaaaggctatggggctaatgctgaagaaaagggggcggtcaacggcgctatccgtcagtttcggaatactcgtcgtagtaatgaaaacgggaatttttgaaattctccgcattgaggataacagctccggaacggaattcgcccttgtccgcaagcccctggatgacggggacgtactgcttctcgatcatgccgcatctgatgacatacaggaccaggtccgcatggcgcgccatgagggaggcgtccgccacggcctcatacgggcagccgtccagaatgatgcggtcataccgggcgcgccagtaccggagcagctcttccaaacggccctgggtcagcaaggcgacgggattggggggaacggggcctgccgtcaccaggtcaaatcccgggaatcttttgccggattgcaggacggaatccggagaaacctgcggattcatcagcaggtggacaaggcccctggcattcttccctccgtaaaaggcggaaaggctggccttgcggaggtctccatcaatgagaaggacttttttcccggtctgggcatacgcggcagccaggttcagggccgtaaacgtcttcccctcccccgctcttgtggacgtcaggaacaggatgcggggcgcttcctccggattgggcagcagcataagttccgcattattgcggaggatgtgaaagcattcttccatgaaggaacggccattcgtgacgaccaggggcagcttcttccgctcctttccggaaagcaggggcagctcccctgccagcggcaggtccgtcaggccggcaaggtccttcttgtcccgcaccttcgtattcagggcgttcccggccagcagggccaaaaggcttgcaaaagcgcctccggccatgccgcccatcgtcatcagggacagtctgggcgctacgggagcattggagccgaacgcaggttccagaatgcgggcgcttggttccgtcgtagccagggccagggcgttttcctccctctttttcagcagcatcaggtaaagttcctccatgaccttctgctcccggagaagagggaccaggccttcatccttggaggccatgtccgacaaaagccggttgagttcattccgctccttttccagttcacccatcctcacttccagcgcgttgcagtaattggcgatggaacggccaatggattcgcgcatctccttcatgttctccgcgagggaggaaaccatgggattctgccttcccgcgctggcgaacaactttttatgctggaggaaattgtcattgaaaagttcgatctgcttggcaattcccgcatcctgaatgcctatattggcggggatcatgtcctgctggcggctccggtccgccagcagcctggcgagcaccttcacctggatcaactccgtcctggtggaaaaaagttccgtccctatttcctgcaccctgttgaacgtggcatccagcgtcgtatccatatccttgacgatccggctgttgcgcttgtagtcaatcacctgcttgtctacgccgccgagctggccgccaagcttgccaatgcgcttgacgatgaactcctccgcccgcgaggcggccatttgcttctcccgcctggaatggtcattgtaaacttcaataagataattcagggcgtcttccgccttttgcggatgggaaagcctcaacgtcagctccagcaggctgctttccttggaatcgggccgcgttacgctcagccggcccagcattccgtcggtggcctccttcacggaaacgcgctccacgaaaatggtccttcccatgctgcctgaagaaaaataagaagtagggcatacattcaccgtggcgaagggaagcttcagcggaacgccgaactttccgtgcagaacgttttccccgctctccttcgcccggtaagacagggaaaattcccggccattcagcggagtaaccgccagggaacaaggctgaaacgccacctcttcactgaactccgccttcaggggagtcgtatggtaaagatccacttcccggatattccgcttttcccagtaggagacgtcgagccccagccccttcaccacacggctcatcacctccgaggacttgaccacatagctctcgttcgccaggttggcctcccccggcttgaaccccagatcggaaagaatgatttccgagacctgggcattcttctgcttgtcatccctcagcatgatgcgggcggtcttctggtacagatacccctgccgggcgcagatgaaataagccagccccccgcccagcagggcgcacgccagaatccagggccaatacctcctggccgtggaaaaaatgaaccggaaggaaaaaatatcgttgtcctcaggctgtatcactgaaacgggcatggaaggaaaacaggatgaaacggcttacaggctgatggcgatgacggcaataagcagggacaggcccgaaaggccccaggcgtagtactgggcgctttcgctcctcatgttgatcttgcggtctgacggagtgacataaataatatcattctgccggatatagtaataaggagaggagaaaatggacttgctgcgcaggtccagcttgacgatcttccggtcacgctccatttcccggatcagcacgatgtcccggttgccgtcgatattcaaatctcccgcccggctgatggcgtcaaaaatggtgacgcgctggccgtccacctggtaggagccgggattattcacctctcccagaacggaaaatttgaagttcatgatctggacgttgacggaggcgtccttgatgtaatcactgttgcggagctttgcggaaatgtcgtgggcaagctgggaacacgtcttccgggcggccttcatcttcccgatgaccggcaggacaatatatccctcgtcgtccaccaggtaccctttgggccgcgaattgctggcgttgttggagatggaattgcccatttccgccatgatgaagggggtagtcagttccggctgcttgctgctgacggaaatataaagctgatcgtctttttgaatagtcgtctggtatttggtgactatatcctgccgggtctcacccgtaatgtcctggatatagagaacctctttcggattgacgcaggaggccagcagcagggagcagacagccagggaggccagccggaaaattccgggagaaaaaagagaggggcggttcatcatcattaaggtataaggttatggttttaaatggataaataatcaggattcttcctgcttggacggaaaaggcacaggcacggaaagatcgttcctgatgagcatgctgcccgagatattcctgaaagcgtcctcgcactgccggacgtccttatgggccagcaaccggacaacggtttggaaaacgatcctggcgtccatgaacagggacacattccgggcgtaaacgatgtcgtagcacaaccgcctgtagaacgggattccgttccttccgtatacctgggccatgccggtcaatccgggccggacggaacagcgcgccatgcggcagcggccgggaaaaacatccagctgctccggaatccatggccgggggcctacaatggacatgtctcccttgataatgttgaccagctgaggcagttcatccagggaatagcggcgtaaaaaagttcccagcggaaaagacctcaagtcatccggaagcaggagcccctccgaatcacgggcatccgtcagggtcttgaatttaaaaaccctgaacaatttcccgcggtaccccacacgcgtctggaaaaaaaacggagacttccgcgtatgaaccaggagtattatggatataacggccagaagaggcgatacgattatcaatgtccataaggatatggcaatatccaatacgcgttttccaaaaaacttatacatggctccgcacgcaaactaccggatttcaaatccggcatctgactttccggagaaaaacgctcatcatcaatgatgataaataacttgcatgattctaaaatttcctttcacgccgccttgcggaagcgctgccatttatatattcaaccacaagtatctgatccgcatgaaaaaatattaattcgtcattgacgacggatttgaaatccgcacttttcatgaatgcaacaacaacaaaatggaaaggcgaaaaacgccgccattcctgaaaaatgaaaccgctttccacgctcacaggaacaaccagaatattccgggttcaaaatgccgcaattgaagaggaccgcaatggaaaaacaggaaaattaaggaaaaagaaacctgaatttccgagggctggaaaattctttcggaaaaggaggcattccgaagaaatgcgcctggggcatgcgccaaaaagcgcacatcttcacggacaatgaattgccggcaacaggcatcaagacaaaaaaccggttcctatgatgccatagggcggatggcattccctgccggagttgaaccgagcctttgccgttggagagacggccttcctgaccgctagaagaagggaacgttacagccggaataaaacagcccgcttttcgcaagccgctggaactggcatagcactttcccggaaagagtcaatgattttgccgtatatgttcccttttttaatcaaacacgggattccagcagggatcgtccgccgcatcaaagcacagcagcgcctgttccggcgtgttcttttccaaagccatgggaggcagttcatcccgtccgaaccagcggctttcagacgtttccggattgggctggaaggagccgcccttttcttcacataatacaaagaccttgcaaaccccgtacgcataggggggagggttgtgcctgttgcggtcatgtagggcaatcaggcgcacggcctccacacgcaggcccgactcttccagaacctccttgaccgtgttgccgcgcacggactggttcacatccacccagccgcccggcatggaccacaagccggagtctttttctttcaccagcaatattttaccttcccggaaaatagccgcgcgggtatccattttcggcgtttgaaatccggtctcactgcaaaacagcccccggaccgtatccatatccagcccggatttggcgctcatgatttccgcggcgatttccctcaaccgctggaaacgctccagatcataggggtctttcgcatacgttatccccgcctgggccataaactgaagttccaccgcccattccagccattgcggaggcagcgcattacggaccgtttcaccagcgtcatccatgcgtccacgttaccacaaggagctatcccggcgaaccttattttccatccggccgccttccgtggcggattgttcactcaggccttctggaccattccccatccccatggcagatttccccgcgtaaccggcacgattgattcatccagtcttaatggaccaaggtacgggcactccccaggtttgccgttccgcatgaaaaaagacgcctcatgacgctccaggccgcatgaggcgttgatcatttttccccttttacttccggaaccgccacgggttcccccaggaaccggggttcacgcccccacagccacaagtccagcatcatccatacgcgcgccgcgcgctccctgaaccagcttctaatgcgtgaactgcggttgggaacatccggggcgctgacggcccacgcgtccatttcctcatgtgcagcgatcgccagggcacgttcattgtgaaattcctgggaaacgacgatcatggttgaaacgccaaagacctccttcatcctcacgacggaatccagcgtccgcagccccgcaaagtcacacacaatccggtcctccggaacgccgcgctccaccagggcctgcttcatccattccggttcattgtaggcgtgggagctattgtccccggaaacgacaaaaaccgtcgccttcccggccctccaaagttccgccgccgtatccattctatgatagaaatacccgttggggcctcccatgaacgtaggggagcaccccagcaccagggcaggcgcgcgaacgggaacatccgcggaatgctcaaaaaccctgcctccggaagcggaagctatgtaccactccgctcccgccgacaacaaggccagcgccagaaaggcgcctcccgccgctttcaaaatgaaaacggttatcccgcccttcctgttccagccacggtccaaatgctttcccatccaataaacggctcctgccagcatagacgctctatttcactttaagctttgaatgtaaatagttcttaaccgcaggatccaccgttttgatatccagcaccgtatcaccccatttatttttcgccttaatgtccgctccgtgatccaccagaaatcccgccacgtccagataaccgccttccgcggcatagatcagcgcggtttttccatgcctggtctttccctttaccttggctccctttttgacgaggtacttgaccatatccaggcatccccgctcggaagccttcatcaaaatggagtggccttccttgtccgtgccattcaaatccgctcctttagccaccagcatttccattccatccatattccggccatcagcggcatacgccagcacattccggcctcccttgtccctggctttcacgctggctttcctgtcaatcaagtaggcaagaatgtcattgcgcctgcacgttgcggctctcatcagggcggtcgtgccgaattcccggtccttttcattggcgtcatatttgcattcttccatcaaatacttgacaatgtccatattgcccccttccacggctctcatgaaaatggaaatgccgtactggtccacagccttggggttggcgcctttggacagcaggtaatcaaaaatctccttatctcccacatacgccgcccaggcgagtggagaccaggtcatcgcgtccctgccattcacgtcgcttccctttttcaagccttccagctgcaacccgagattcacccagttcttcagcctgttttttgactttaaggggtcgagggccgccttcacttcctttaccttctttaaagcggcatcgtaagagtcaattccagcggcagcggcgtgagaaatggaagccgcacacaggcaggcgcccaccgcccaaacggagagtttgttcaaattcatggtcatcatagggtgtggggatggataccggaaagccggcagggaaacccccggaatgggtgccaatataaaatggaaaaaccttttggtcaataagagaaggaatgggccaacaccggacctctaacaaaaaatggctcctacccaaaattccatgtgcccggctgtccgggaccccggacagcgtcactacgcaatcctgcaagggacgcttgaacataaatgccccggggcctttcacggaaaaccagatgatttcatcgcaaaacagggagaatactccacccggcagtactgggggaggctcctttcaacacattcttcaggtaactattgttgaccggagatacaagtaaaagcggtaatttccgtatgcttgaagacggaaaaggcccgccagaagcgagccttttatctacataatttattgttattcagcgaagtacccccgaccggactcgaaccggtacgtccttgcggacaacagattttaagtctgcagcgtctaccattccgccacgagggcattgaccggacggcactctacaggaatgccgcggggattcaagcacgaatccccttccggtttttaaatccctagccgcagacttccacaaccatgcttatttccaccgccacgttgagcggcagggcggacacgcccacagccgtgcggctgtggcggccgatttcgccaaaggcttccaccagcaggtcggacgcgccgttcagcaccttgggatggtcgtagaaatccgggccggcattcacaaatccgttcacggccacaatgcgggaaaccttttccagggagcccacggcctgcacgatgacggccaggcggttcagaacggcggctcgcgcggcggcctgcccttcttccaccgtcaagtcctgccctaccttgccgaagtatttgtcctccccgttcacggagatgccgccggagaggtgaagcaggttgcccgtacgcacgcattgcacgtaggaacccacgggcgcgggcgcatcgtaaatggcgtaaccaagatcggaaaggcgttgacgtattttatccataatagagaatttgacaaaggttggattggaagaatgcaccggaaatatttgcgtttccagatgcatttcatgacattttgaacaattttcggcctgtttgcacgtaaaatgattgccatctacctcatttagttgctattgaaacaacccgtacatgatgaccgaagaaactccttccacagaccccaagcagcaaattccggacctttccggcttggccgacttccaatttggtccggcctgggcgagaccgggagcccgtcaggaacgttccgcgtcctatccggaacgcaggtccggcgacaggcagggaggcgaccgccgtccgcggcgcgacagccgcgaaggacgccagccccggggggaacgccgttttgacggtcagaatggtgaaagaagattcaaccgggaagaccgcacccgcggttccttccgcccgcgccgcgacggagaccgccgcgaacaggcgccccgcccgcccatggcggaaccggccgaaggcctgcgcgtggagctgcgccccgtggattccggcctggccgccctgcaccaggaggtgcagaagcaccgccgcaccatttccctgctggaccttgccaaggtggtcatgggttcctacgaccgttatgacctggtgttcatgaagcaggagaacggcccggacctttaccactgcaagcacggcgacggagcctgcttcatttcccgccaggaggccgtcaagcatctctggcagtcttcctggatgcccaagtattacgagtccgtggaacaggaagtggaagcgcccaagggcgatttcaaggcgattgccaagtgttccctgaacaatgaactggtgggccccgtcaactggcacggctaccagtccgccctgatgaacctgcaccgcaccaagtttgccagcatgccctttgaggcattccgttccaagatcgtgacggacaagagcgaggaagccgtgcaggcatggcaggaagccgtttccaagcgcaccgcctggaagcccgtccgcgaaggcgcctccgaggttcttctggaatcccccgccgccgtggaacaggatttcgagtccaaccactttgaagagtgctatgacgtcacggacaaggtgttcgtcaacggagccgtgaagaaaaaccatctttcccccggcctgtgggcgcacctgatccagttgtccggcaccacgcgccgccatcccagcatgctgattccgaacctctgccacgggctggcgcgccaccacatgcccattttcaagtggaagggcaaccattacaccggcccggcacgccccaaggccatggaagaaggcaccgttctttcggattccctgatgtccatcgccacctgggcggccaacaatccgggcaagggcgtggacgccatgctcagggagctggcccccgtgccggacccggaaaaggccacggaagaggaagtggcccaggctacggaaaaacagcagaatctggtccgcgacctgttctggctgtccgaacagggctacattctggttttctccaacaacaccgtcagccgtccgaaggccgttccggcccaggccccctctcccaaaaaggctcccaaggagaagcagaaaccggaagagaaggagccggacatgccggtggcggaagccgccgcgccccaggagcagaaggaggacaccccttcttccgaagccccggcagcccgggaggaacccgctgaagaaactgacacggcagccgagcctgcggaagcagccgcccctcccgtggaggaagaggttcctgcggaaaatgttccggagacggttgccgcaaaagcctgacgcctttcccgaattcccccgtcatacagtccgcaggattatcttgattctgcggactttgttttgtagaagaaaaggaaatcaacaggattttacatatgatcagtacaacaatggcaaccgctcttaatgagcaaatcaaatgggaaatgtattcagccaacctttacctggccatgtccgcctacctgcaggacgccggcctgacagggttcgcccactggatgcgcgtccagtaccaggaagaaaccgcccatgccttgaaattttacgatttccttctggcgcgcggaggacagtttaccatgttgtccatcgatgccccggccgcgagctggtccaacattctggaaatgtttgaagaaacgctgtcccacgaacaggaggtcacgcgccgcatcaatgacctggtccgcctctccaaggaggaaaaggacttcgctacggatattttcctgcactggtttgtcagtgaacaggtggaagaggaagaaaccgtcaaggacatcatcagcaaactgcgcatgatcaagggagaaggccagggaatgctgctcatggacaaggagctggcggcccgcacctttacccctcctcccgccaattaactcattcaggcgcttttccggccattctccggcacgttttccccatgaaaacgcttttccggagaatggccggcagaacagttcggctatcaggagcgcatgaacatcaagataaggccggctgcaagggaggatgtccaaaaaacaagcgctctatatgatgatttttttgcctgtaatgctgcacagctaccggaaaattgcattgcggcaactgaaacgggagattgcccgaatcctgtgattgaaagcggcagcggcgataatatgatcgcggaaagagacaatgccgttatcggattcgtgcatgttgaagaaaacgcgccacctccctatccttccgtagttcctcataaatatggctgcatcatagactttttcgtcatgcgggaatacaggaggaatggagctggacgcctgcttttggataaagtcaaacgctgggcaaaatcacgaaaccaggaacaccaggaactcacggtatgggagaataacggcagcggcagaagattttacgagcgtgaacattttacaacagcatcccggacaatgcgcctggacgtgtaaccgactttttaaatggaattattaaagatgaatgattttgaaacagccttggtgagcccggggaaaaacagcctcattccggaggaggacaactggttcggccccctcgtcggaacctgggatattgaatgggttgacgggcacggcacggagcatgaacgccacgtgaaaggggaatggattttttcatgggtcctggaaggcatggccgtccaggatgtgttcatctgcccttcccgggaggcccggaagatcaaaacctggccggacgccgcctacggcacgacgatcagaatttacaatccccagcaacggacatgggacattttttacggtgtggccggagaagccacgcggctggaagcgagaaaggaaggcagccggattgtcctgacggaaattaccgggcaaaagatgaaatggattttttccgaacttacggaaaatacgttccattggagaaacatggccacggaggacgggacgcactggttcctccagggggaagcgttcgctgccagacgtacctagaacacgcttgttcatcggcatggctgaacccgccgtctttccctttctgcccccttccaggcccgtttaaaggggttttccctgccttcactcctgtccggcaaataaagcagcccggacccaacaaggagccatgcctgccgatgcccgccaggcatccataaaaatttccgggggtagaaccggcttttttctcttctccggcagtccagaactgatgacgggacctgcctccaaaggcggcagcatcctgtttttcctggtgcgcacccgtataaaacttttctgaaacaggcctccctttcccatggagagcccttgcatgaggcctctttccggtccgggcttgtcatgctgacgcgcccttttatgccagatttatgccggtttcccggcagttccggaaaaaactttcattcatcaacagcttacgactatttttaacatgttattcacattctatcctcaaaatacaatcattctattaacattcaacatattgtatccggaataccatcaaaaggcttattatctgcaaatgtaaaattttaataaaaatttatatttttgacttgctcgcggaaggcggcggcggtaggttggctgaaccgccgccaagcctccggacggcaccgttaccaaacctaccccagacattcaccacgaccatgagctccatttccgaagaagcaaacaagctggcggatttcatcctgttcacgcaacgttcctgcattctgaatctttcttcagaattgaatgagggcaaggtttcctatccccagtttttcctgctgacctacctggccagcgaggacttcctgagcatgtccagcattgccctgaagatggggcattccacggcggcggccaccggcatggtggacaaacttcaggagatgggctatctgaaacgcatgagcgcggccaaggaccgccgcaaaatcatggtcgccatcacccaggaagggcgcgacctggtggaccgcatgcgccagaatatcgtccgggacctggccgccctgatggccggagcggaccccgacgcacgccagacgcttgccgataccgggaagtccattaagaagcgccgtctggcctgatttcaggtttttattggttccgtaccggaaaaaagcagctggttttttaccggttcgggcgggcttttttattaattctccgccgttccattgtttttcagttgccgcaaggacttgcggcgctcctgaccatatccggtttacggttttaaacggaccgcccccttgttcccggctgtgtttccatcaggggttacgttgaaaggacatataccgcggcttgaacagcaacagccagccggaagcggaggctgcggtctgcgtgcctgaatttttttcctcagcgcagcagaggggaaattcactctttcctaaaaaggcttcctgcggagattgtttttgcctgaattggggcggcgtgctaaatactgtcagtcacgaatgcaatagaccatggatctccatacttatttacgcaattttccggacgcccagggccgttttggcgaatacggcggcgtttacctgccggacgagcttgttcccgcctttgaagaaattacggaagcctaccagacgatagcccactccgcccagttcatcaatgaactgcgccgcatccgcaagcagttccagggacgccccaccccggtttaccactgcgaacgcctttcccgccacctgggcacttcccagatttacctgaaacgggaagacctgaaccatacgggcgcccacaagctcaaccactgcatgggtgaaggccttctcgccaaatacatgggcaagaaacgcatcattgcggaaacgggcgccgggcagcatggcgtggccctggctacggctgccgccttcttcggcctggagtgtgaaattcacatgggagcggtggacattgccaagcaggcccccaacgtcacccgcatgaaaatcctgggcgccaaggtggtgcccgtcacgcacggcctccagagcctgaaggaagccgtggattccgcctttgattcctacctgaacagttatcaggattccatttactgcatcggttccgtggtaggcccccaccccttcccgcagatggtgcgcgatttccagatgtgcatcggcgtggaagccagggagcagttcatggaaatgacggggcttcttccggacgcggtgtgcgcctgcgtgggcggcggcagcaattccatgggcatgttcaccgccttcctgggagacccgctggatatttacggggtggaaccgctcggcaaggggcccaggctcggggatcattccgcctccatctcctacgggagcaagggcgtcctgcacgggttcgagagcatcatgctccaggacgaggacggcaatccgggaccggtccattccgtggccagcgggctggattatccttccgtgggaccggaacacgcctacctgcacgacatcggccgcgtgaattacgttaccgccacggatgaggaagccgtagacgccttcttcaagctttcccgctatgaaggaattattcccgccctggaaagctcccacgccatcgcctacgccatgaagtgggcccgggaaaacagaggaggcgctatcctggtcaactgctccggccgcggagacaaggatgtggattacgtcgtggagcattacggctacggggaagaccgccagttcccctcctgatttcatccccttcatcgtttccggcggagggaggatttccctgccctccgtccgccccctttccgcaaggcccttccgccacgcccctccatgaaagaattgtccagcctggttcaacggagtttccacgtcgttccgcgggaagaggatttccataccctggctttgggagcgtccggccgcaccatcgtccgcatccgcctcggctcccgcacatgcatcggcatccggtggggcaatgaccgcgcggataatgattccttcatccccgcggaccggcacctgcacgcccacggagtgaacgtgccggagatttacgactacgaaccgctcggcgccggctgcggggccgcgctggtggaagacctgggagacgccagcctgctggccttccggggagagtcctggccctccctgcgcctgcgctacatccgggccatggaacagctccatctgcttcactcctgcccgtttccggaggagttccccctccagcccgcctttgacgaagccctgtaccgctgggagcagtcctattttgcggaacacctgctgggggcccacctggggctggaaacggattccttcctgaaccatccggccctggaagagctggcgcaattcctggcctcccttccggaatgccccgtgcaccgggacagccagtcccagaacgtgcacatccacgcgggtaagacctggctgatcgatttccagggcatgcgcggcggacgcccggagtatgacctggcctccctggtttatgacggctatgcccgtctggaaccggagcaggcggaggaattgatcagggagtgggaaaagatttccgggcagcccctggatgaccgcatcttccgcgcctgcgccctgcaacggctcatgcagatgctgggcgcctacgccaacatcggccacaaccagggaaaaacctggtatctggcccagattcccgccgggctggaacacctgcggaagcttctgcccggctccacgcttgcagaaccgctggcggccatgctagcatgatctttctccctgctcctgatgacgctgacccccagattcctgcttgtgctgtccctgttccagatttccctggggctgggctggattctggggtacgtgtttcttccgcccaccattttctgttatgagcgggcggcggaacgttccctggcaggagagtaccggaccgtgcgcccggaaggtctgaatgcggaaagcagcatcgtcctccagccttacgattatttcaacaaggggcagacggcccagcttcccgtggtttccctgcaccgggaatcctccctgaacagctttgccgcctatcctcccaatcccatggattacacggtgctgttccgccacctgtacgagcagggggccaggaatgtttacgtgatggctcccatggcctgggaggaagagccggacagcatcgtcaaagccgccgtggggtatgagctggaccgcttccgccacaaggcgctgggacggcagatgagcgagtcctcccgccacgcccccctcccgccggactggaaaggcctggttattcccgctgccaacatcgtgggaaagacggacctgttccctcgcgcggacaggctggtgggggaagctccgcaactgaccacggcagcccccgccctgggaaccgtcgtggaaaacaacgaactgttttccccctccccggagaacagggtttctccgccgcttttcatccgctggggtgaggagatcatccccacccttccgctggccgccgccctgaacgcgctggacctgaaacccggcgacgtgagaatcattccgggcgacacccttttcctgggcggcaagcgttccgttccgctggacaaatatggccgcattcccctggcggaacacagcagccccaccatgctggacaccaaggaggtgatcgtccccgtcatgtccggcctgcggccgccggataccaccgccgtcagaaaactgctttcttccgcggacgcggttctcgtttccgaaccgtccgccctttccgacacgccggacgcacaggccctcctggcggcgcaaaccatccgcaccctcatgggggcgctggctccggccccggccgtcctgattccggtagcccccgtatgggtgcagtgggtcatcgtgctggacgtcctgctcctggcagtatgggccctccgtttccagcgccgggggcgtttcatcatctgggggctctgcatcctggcggccccggtcatcgcgtggtacctgttttccgtccatgacacctggttccccgtcatgacgcccgtggcggcggtgctgtgcgtagtgctggcgggctgcctgttcccctggctttcccccccctcccgcgatgcggacgaagaggaggaggaagacgccggagcccccccgccggaaggtaatggagccgggcacgtgctccccccggacaacctgtaccaggaacccaacgaggtgcctatcccccaccattccaaaagagaacatcccgactcatgacacagcgcaagcacatccttttcatctgcaccggcaacacctgccgcagccccatggcggaaggcctgttccggaagctttcagcgcatcatccggaatggcgcgccggttccgcgggaacttccgcatggcacgggcaggaggccagcccggaaacgctccacgtcctccaggcgcacggcgtcaacctctcctgccatgaaagccgccccgtcacggaagaactgatggaaaacgccacggacgtctatgccatgacggaaagccacctggccgccctgcttgccaatttccccgagcatgcggacaagatcaggctggtcacctgctacacggacaaccgcagcattgcggaccccatcggctgcggtcaggccgcctacaacagcgtggcgcggcagttgacagccgccatccaggccatcatcgcccggatggaacagcaagcgtgacaactctttcccccccatggccgtcccttccatacgcattgacctgtccctccaggagctggtgctggaagaatccggaaacatcctgctccggtgccccgtttccagcggaaaagctggcacgggccatgaagagggctccggaaaaacgcccaccggacatttccgcgtctgccaaaaaatcggggacggagagccggaggacaccattttcatctcacgccttccggcaggccgctaccccgccgccatcccggaaagcctggatgaacattcggactttatcctgacgcgcatcctgtggctggacggcctggaaccgcacaacgccaacacgcggagccgctacatctacatccacggcaccaatgatacggacctgctgggcgccccggcctcccatggctgcattcgcctttccccccgcgacatgctggatctttttgccctggcggaagaggggatggacgtgttcattcagtgctaaaccgttcttttttagatacaatctaaaaaagttattcagggaaaaggaaaataattgaacaaaggtcctcttgggatgtataaagtatgaaggtaccggtatttggctgccggcctcctgttccataaacatccactcatccccaagcaatcatggacgatccggtcttattatcccgtcttcaattcgccgttacgatcatgttccactacatcttcccgccgatgaccatcggcctgggggtggttctggtcgcgctggaaggcctctggctgaaaacgaagaacgaactctaccacaagcaggccaaattctggaccaagatattcggcatcatcttcgccctgggcgtggcctccggcatcgtgatggaattccagttcggcaccaactgggcggactattcccgctgcgtgggcgacatcttcggcagccctctggcggcggaaggcatcttcgccttcttcctggaatccggcttcctggccatcctgctcttcggctgggacaaggtgggacccaaaatgcacttcttctcctcctgcatggtcgctctgggcgcccatttcagcgccatctggatcattgtggcgaactcctggatgcagacgcccgccgggtacaagctggtggaagtgaacgggaaaatccaggcccatatcaccagcttctatgacgtggtgttcaacccgtccaccgtggaccgcctgacgcacgcgctggccggctgctggctggcgggggccacgctcgtcctcagcgtctccgcctggtacatcctgaaaaaacgcttcaccggaggagctgaaaaaagcttcaaggtggccctggtcatcggcctcatcggcgtggtgggcatgggcatcacgggggactccagcgcacgtgaagtctccatccaccagcccgccaaagtcgccgccatggaaggcgtgatggaaaccggcgctccgctggccctccaccttgtcggctggatgaacccgtccacccatgaagtgacgggcatctccatcccgtacatgctcaccttcctgacccatcatgacctggatacgaccatcaccggcatgaacgacatcccgcaggacgaacgcccccccatcctgcccgtcttctactccttccacatcatgatcctgatcggctgcgccctgggcgccctgttcctggtgggcctgtggggctggaaaaaaggctggcttttccagaagcgctggctgctctggtgcttcgtcttctccgtgctgggcccccaaatagccaaccaggtgggctgggccgtggcggaaatggggcgccagccgtggatcgtatacggcatcctgagaacggaacatgccgtatcccccaccctcaccgcggcggaagccctttcctccctgggcatgttcttcgtcatttatgccctgctgctggccctcttcctctatcagatcacccataaaatccacaagggtccggaccaggaagcaaacgaagacgacggcaccggggaaggcaagctccaggtccccttcgtcaaagactaaccttcagcccctcttaaaaccatgttggacaatcttactcttacagacctgcaaatcatctggttcatcctcgtcggcgtgctcttctccggatacgccattctggacggctttgacctgggcaccggagcccttcagcttttaatcaagggtgatgaaaacagaaggctcacgctaaacgccgtgggccctgtatgggacggaaacgaagtctggctcatcacggggggcggcgccctcttcgccgccttcccgtacgtgtacgcctccgtcttctccgggttttacctggccttcatgctcctgctgctcaccctcatcttccgcgccgtctccatcgaattccggagcaagcagcccatgaaatggtggcgcagggggtgggacaccaccttctccatcagcagcctcctggccgccctgctcatcggcgtagccatggggaacgtcaccaagggcattccgctggacgaccagggcaacttcaccggaaccttcctcagcctgctgaacccctactccgttcttctggggctgacgacggtggccctgttcgccatgcacggaggcatctacctcctgatgaaaacccagggaagcctgcaggaacaaatcaaaaaactgctccggccctgcgtcatcatcttcaccgtcctgatcatccttcacggagcggccaccctgctgtacgtgccgcacgtagcggcggccctgcaccgctccccctggatttacggcatcgcggtgctggcggtcatttccatcaccgccatctggatcttcatccacaggaaccgtccgggctgggccttcgtcgcctcctgctccaccatgggctgcatgatggccctcttcggggcggccatgttccccaacctgctctattccatgcccaacccggagaactccctgacgctcgtcaacggctcctccacgcgtgaaagcctggtcgtgatgacgtacatcgccatcctgggcgtgccgctcgtcctggcctactccgccgccatctactgggtcttccgcgggaaggtccagctcaacgaacacagctattgacgccctgcgggcagagaatagcgattagtgaacatggaatagccccgtatcaacccatctttcggcatgaacgcctccatcttctccagactcccgcctgaggaaatcacggcgctccaccaatcatggaaaaacgatcccctgtccgtagcccctctctgggccgcctggtttgagggctatgaactggggagcggcaacgctccgcaggaaaaaggaaacgcagggaactacacggacgcctccccctacaccgtcccgccggaaagcgcggaatgccgggggcgcgtcaaccagctcatccgggcctaccgggtcatgggccaccagtgcgcgcgcttcaatcccctggcgtctccggacaagacctgcaccccggtcaatcttgaagaaatgggcttccgtccggaagacctggaccagcccgccaacatcggcaccttcatggacggcggcacgttcaccctccgtgaaatcatcagccacctgcaaaaaatctattgcggccccatcgggtttgaataccaccacatagacaatctggaaatccgctcctggattgaagaaaaaatcaagctccgggcgaacggagtggactacggcccggaggtccggcgggacgccttcttccatctctgcaaggcggaattgttcgaggaattcctgggcaagcgcttcattggggaaaaacgcttctccctggaagggggggagggtgccatcgtcctgctggacgccatcgtcaagcgctgccccgccgccggcgtctcccacattgaaatgggcatggcccaccgcgggaggctgaacgtgctcgccaacatcctccacaagccgctgaaaaccatcttccgagaattcacgccggactacctgccggaatcccccattggcagaagcgacgtcaaataccacctcggctacgccaccacgcgccatgtggacggccgcgaccttcacgtccgcctctcctccaaccccagccatctggaagccgtgtatcccgtggtggaaggcagggccagggccatgcagcacaacctggaagactcggaacgcaagcatgtgctgccgctcgtcctccacggggacgccgccttcgcaggacaggggctcgtggcggaagtgctcaatctttccctgctgaaaggctaccgcacgggaggcaccgtgcacctcatcatcaacaaccagatcggcttcaccaccggaccggacgaggcccgttcctcccgctacgccacggacgtggcgcagatgctccagtcccccatcctgcacatcaacggggaaagcccggaggacctggtgtgggcggcggaattcgcgctccagttccgccagaagttcgggcgggacatcattctggacatgtactgctaccgccgcctgggccacaatgaaacggaccaggccgccttcaccgcacccatgcagaccaagcggattgaggcgcgccccaccgccgcagccctgtacggaacggcgctcagggagcgcggggaattgacggaacagcaggagcaggacatccggaaagacctttgggaaggcatggaacaggcctacctgcaaatgaaggaaaaccccgcggactacatcctgcccgccaccgcgcaggatgcggatgaaacgcccatcccgcgtaccagcgtacggacgggaatcagcccggagctgttccagcgcatcggagatatccttacggaactgccggacggcttcacgccccaccccacgctggaaaaacgcttcctggcccgccgccgggaggccttccgggaaggcggactgctggactgggccatggcggaagccctggcctggggcagcctgctcgcggaaaaccacaccgtgcgcctgtccggccaggactgccagcgcggcaccttctcccagcggcacgccgtcctgcatgacttcaatgacggctccctgtacactcctctggaaaagctgaaccacggcactaccgctttccgcatttacaactcctccctgtcggaagcctccgtgctgggctttgaatacggctatgctctggaaagcccggacgcgctggtcatgtgggaggcccagttcggggacttcgccaacggagcacaggttattgtggaccagttcattgcggccgcggaggccaaatggcaccagaaaaaccgtattgtgctgctgctgccccacggctatgaaggggcgggctcggaacactccagcgcccgcatggaacgctatctccagctgtgcgcggacgacaacatgcaggtcatcaaccccaccaccccggcgcagtacttccacgccctgcgccgccaggtgcaccagaacgtgcacaagcccctgatcgtcttcacgcccaaaagcctgctctcccgtccggaggccatctccccgcaccgggaattcctggccccctcccgtttccacgaagtgctgccggacccggacgctcccgcgccggaccaggtaacgcgcgccgtcttctgcaccgggaaagtttactatgacctagccgcctaccggaaggaacggaacatttcagacacaatcattatccgcctggaacaaatctatccgctggcccaggaacagctcacctacctgctggccccctaccagaaggtgcgcgacttcgtctggtgccaggaggaaccctccaacatgggggcctggggccacctgcggaacaggctggggcgcctcttcgccacctccttccgctatgcggggcggccgcccatggcctgccctgcggagggagccaaggccctgcacgccgccgcgcaaaaaagactcatcgccaccgccttcgggccgcgggcgcaatcctgaacccatcttcctcccatgagcgacatcctgatccccaacttcggagaatccatcaccaccgccaccgtagccgcgtggcacaagaatgccggtgacacggtagccaaaggcgacaccctggtaacgctggaaacagacaaggtttccacggacctggaggcggacgaaagcggcgtgctggaaatcctcgtcccggaaggagcggaagctcctatcggggctgtcctgggccatatctcctccgctgccggaaccgccgccgcaccggaaaaggaagaggctcccgcgccgccggaaccggagaaaaccacagcgccggaaacacgggaggaaccctcttccacagcccccgccgccaggactgaatccccggagcaaaaatcggaaaagcaaatgtccgccccggaacagaattccgctggagagagcggaaagcctgaaaaggaggctccctcgcgtttcatcaggaaacccatgagccccctgcgccgcaccatcgcggcccggctggtggaggcccagcatcaggcggccatcctcaccacttttaacgagtgcgacatgtccgccgtgatggagctccgcaaacaattcaatgcggcgtaccgggaacggtacggcaccaagctcggtttcatgagcttcttcatcaaggcggtggtcaaggcccttcaggaagtgccccaggtcaacgccagaattgacggcacggacatcgtggaaaacctgtattacgatatttccgtagccatcggcacggacaagggcctcgtggtccccgtgctgcgggactgcgaccggaaaacgctcccggagctggaactggaactcgccgccctgacggaaaaagtgcgcggcggaagcttgtccatgcaggacctgcaagggggctgcttcaccatctccaacgggggaacctacggttccctgctctccacccccattctgaacccgccccagagcggcattctgggcatgcacgccattcaggaacgccccatggtccgggacggccagatcgtcgcccggcccatgatgtacctggccctttcctatgaccaccgcctggtggacggcaagcaggccgtgcaattcctcattgccgtgaaaaacgccgtggaaaatccggtcatttcctattgaactgaatatttttgatatatttcgtctttagcatctgcagctaatttcgtggattcgaagcttttccatgaaatcaaattagcacccacgcatataactaaagttatataagaaatctctcctttagctattaataaactacttacagaagctatgccacaaaaaaggcaccaataacaagatatcttatgatataattttacaattggaaaatatttccaattaacataatgtttttgttccacgcaatctacccgtgtcaaaggttgataagttttaaaaactaaccagtaccaataaaatggtccgacaaaaattatttttaatacctcatttaaccattcagcagatttcacccaactaagatgttcaacaatccatacctcaccccaccttccccatagaaaaagaatacatataagtaatataaaaaattcccagctaaagaaagtcccaataaataaatattttattttatcatttattcttaattctttctccattttctttcttttgctaatttattaaatttagatatagaaattttcgctaatttaccacggctcgcattcgcgtcactctcgaaatgttcctgtgtatcagctgttttaattgtctttatttttgcactccctagagctcttcctttaatagttgcttgaccataaccatccaaagccatcataaaaccagcatccaatattgaatatgaacgatccgaagaataatttaaattttccccttcatccaaacattcttttatcttcgttttcaatccttcattagaagacatacgagcacgttcacttatcgtcaaacgttcagcgttgcgtgaacgtaaactttcatctaatttatgccaaataggattataaataggattagaaggagtaatagaagcttgaataaatgttatttcatttaactccttaatcttagcgctaatttttcttaaatctgaaattgtttcaattgtacaattcccaggtattaataacagctgaagccccttattaataagcttaactaagtaatttcttgatgccacctcatctctagaaggaacttgttctaaaataataccagaatattttggtatatacaaaaacattcttctggtaataatgttatcatcaacgaaatatgattttatttgtttgactttacgatcaagtcgttcaaattgatccttttcacgatattgaataagttctccaaaaataatattaagcgtttcattcgagtctgattgtaactctctttcctcaattccagaaagagtccaatggacgcctttagtactaggaacatcaggagttatttttaaacttttgataatctgttcttcatgaatgaacaaaccttctttgattattctatatatattgaatctttttgatgattccatagtatttttatatatagcttataaatcttaattagtcaaccataaaactaaatatatcaaaaaaaatctatcattccccgtaaaactgcaggaatgatagattttaaatatcctttctaaagaaaattatattattttacatgtggatggcgattccctcggaagccagcatggattcatggatggcctccgacagcgtgggatgggcaaagatggtggcgtgaatatcctcgtccgtcagttccgcctgaatgccaacgcccagcgtggcaatcagttccgtggcttccggccccacgatgtgggcgcccagcagttcgccgtgtttggcgccgtacagggttttcacgaagccgtccgtttctccggcggccacagccttgccaatggcctggaaggggaatttgcccaccttgtactccacgcccgcttccttgagggcgcgttccgttttacccacggaagccacctgcgggtagcagtacgtgcagcttgggaagaagccgacctgcctgggctggtagtccggattaaacatgccttccacggcctgcacggcttcaaaggtggccgtatgcgccagcagcacgccgccgatcacgtcgcccgccgcgtaaacgccgggaatggatgtggcgtagcggtcattcaccttgatgaatcccttttccgtcagctccaggccgggagcggcgggaacgaccggcttcacgccgatggccaccaggcagacgtccgccgtgatttcctcttcctgtcccttgctgtttttcacgttggccttgaccttgccgtcgcaggtttccgtgacggattccacggaggctcccgtcatgaccttgatgccctgcttcttgaacgcgcgttccagcgtctggcaggaatcgtcgtcttcattgggaagcatgcgcgggagcgcttcaatgagcgttaccttggtgccgaaggagttgtaaatgtaggcgaattccgtgccaatggcgccggaaccgatgatgatcatgctttcaggccgcttttccagcaccatggcttccctggaaccgatgatggtggcgccgttgaggggcaggctgggcaccgtgcgggtgacgcagccggtactgatgaggatgttttttccttccagaacgctcgtcattccgtcggcggccttcacttccaccttgccgggggcggtgatggaggcttctcccgtaacggagtccaccttgtttttcttaaacaggaaacccacgccgccggcaaggcggtcgctgaccttgcgggaacggccgatcacctcgctccagtccacgctgacgccttccaccgtcatgccgaattccttggcccgggccgtcacggtcaggtaagcctccgcatttttcagaagcgccttggtggggatgcaaccccagttcaaacaggtgccccctacccggtcgcgttccacgcacaccacggattttcccagctgggcggcgcggatggcgcccacatagccggcagggcctccaccaatgacgatgagatcatattgcatgaaattactataaaggcatccccccttgcgggtaaagaaggaatatgagcatgcgccgcctgaacggcgccccaatgacaaaagaaggaaagattaaatagaggggaaatgcctgttaaagactattttctcttttgtatttagtcttccgtctttattccttccccttcacccactccaccaggtcccgcatttccgcggcggtgtccgcatacaggccgtccgtgtaggttccgtggtcgtacaggatgttcccttccaccatggtgaacacgcagtccttgccggaagcggcataaacggcatgggacgcttcgttgaaaatcgggcagaggttcggttcatccatatccagggcaatcatgtccgcgggagctcccggagccagcgttcccagccccggcgtccggaagatgcgcgcgccttccgccgttgccatgttcagcgcctgcacggcaggcaccgcggtggcgtccccgctgcatcccttggcaagaatggcggccagcttcatcgtttcaaacatgtccaggctgttgttgctgcacgctccgtccgttcccagggagacggaaatgccggcccgaaccatgtcccgcacgcgggcgaagccggacgccagtttcaaattgctgaccgggttgtgggcgattgccgctccggaagaggctaccagttccagttcctcatccgtcacgtccaccatgtgggccagcacggtgcgttcattcagcagccccatgtcccgggcataagccaccgggcgcctgtccccgtgcagggagcggcactgctccacttctccggcggattcggacagatggatatgcagcatcaggtccagttcctccgccagcttcatggaacgccggagcacgtcgtcactggtagtgtacacgctgtgcggcatcagggccacctgcaccctgccgcggcccgcaaagcgcgccgcctgctcccggtacaaggcttccgccgcatcccatccgccgtacgccggggaaggaaacgcaaaaagagcctccccgcccacacagcgcattcccatgcgctccacctcccggagcacgttgatttccagcaggtaggagtccacaaaagccgtcgtgcccgtccgcatcatttcatacatgcccagacgcgctcccagggagacgattctgtccgtcaggcggccttccaccgggaaaatatgcccggtcagccattccatcagaggcaggtcatccgcaaagccgcgcaagaaggtcatcggaacgtgcgtatgggcattgaccagccccggcatcagcagaacgtttcccaggtccctgcgggcggcgggcttccacctggtttccagttccgcggcgctccccgtttccagaattttcccgtcccggatggcgacggccgcatttccggcggcgccggcctgttccgcgcccgccagcatgcgggaagcggtcaccagcaaatcacacgcttgttgttccatggcgcagaatgtaccccaccgggcccgttctggcaacttcatctcccggagcccggggatttcatgcaaatttgacatttcatgtttgacttcaaaagagaaaactgccaagaatgaaccacagttaaattcaccatttatccccatatgaacaagactatactgctaggtttggccctcgtggcctccgtgtccgccgccaatgcctaccacgccgacaaatacgacggccagttcggcatgtccctggaaggagcttacggcatcgccacaaaggatgccatgcccaacgtggccggcggcaatctgagcattttcaattacattgaaaccggcagcattgttcatcagatttccctgaacggcggcattctggcaggctcccaccatcccagcgtgcatgacctgggcatcagcggcccctataccgccagcgtccgctccacctacgttccgatgatggccggttatacgctgaacctccccatcggcgattacacgatgttctatctgggcggcaaggcgggcgccacgtacggagacattaaaaccaccatccacgggctggaagacgggagccgttcccacaccatctccaccaccaagttttcctgggcagcccaggccgggttcaagttcagcatctccaagagcgctgacttcctgatcggctatgaatattaccagattcagggctacagtgatcccggctaccacaccatcaagctgggcttctcctggaacttctaacaattaatcattgagttcattactgcctcccggcggctccgtacatcacggagccgccttttttgcgcatggaatgccagcccgcacaacagcaaaaaacaagggggagaggcggaaggctgatacgtatctttaaaccggcacggctcttgtccgaggtgaggggtagatttgaattatctcataaggcgttatgcaaattcgtaaaaaaatcgaatagaatcgcttatgaacggagaacccggaacaatgaacctagcacagaccttcgtatcgaacttacttttgcttccccgtggaacgtgaggcacacgtcccacgggaaatgcataggattactgtaaattattccgcattcggtagacgttctccataatggtcccagccatcgagtatgagagatccattttccccaccgtttggggattccaatcaaaagccttaatgacatcaacataccccttggcaggactgccgcttcctttcgcgttgacaaaatccgccaaatcaaaattggcaggattggcattgttaagccaacccacccttctggtcgttgggttgtatgtcataagactggtcacaccacaaacaaacggagctataaatccatccggaataattgccccttcgagagctgcatcaggatttacgccaaagcgaggcttagaacacttcggtttttcactcttcgattttggcaacttgcaagccttgatgttgccaaaactacctccggccttgttgtaaatctcttggaacatcatgtagagtttatcccaaaagcgaataatgtccatcgtcatgtccagagccgacataatggtctcgttaaaaagaacatactcgttgccttctttgcgacttacagaagaatccgacagaactttttcataaaacgtcacgcatttacctttttgcgcgtagaccgcgatcttcgaaagggattccggcatctccatgaagctgttttcctgcaagaagattaaagggatgcatgccattgcgatgacgtcttccactttgcatccatccccttctccggaacgccaaaccaccttaatttgattgcgtatcacgttctcctcaagataactatagaggcctttgtaattggaaagagccgctgttggcagctggacattcgtgtttcgagccgaacatatacttgcaaagttagccttgaagctctcctcactacgcgagatcgtatcttcatccacgccttccataaatttgttgagtggtgcgataatctcgataggaaccaaaaaattaaaagcttgattgccggcagcagctcctgtaatttcatcaaaattatcactccagaaagatttgcacttagaccattccttgatggatttgccgaccttttcaccgtaaattttggacacaatgtaattcgcgacggcaaaggctgtgtgcccaccatccataatgccctcaagatcttcgtttttgagggtaatcctgtaacggttgcgttccagttttttgcaacaaaatgtcgacaccatgattcctttggacatgatccagaaaagttctggactgtactccaaggtttccaaaatgtcttttacaacgcggtttcttgttgcattgcgggggttgacgccattgagcgctttctcgaacagttggataaagtcgctaacgccaatgtagcctgaaaccctttgaaattgaaatcctttgggatcagaatgaccaactacctcctgctggttgcggagccgtacgattattgtattttcagacataactttgttctatagtttgttatgtctcagagtagcaaggatatccccaatcaagtggggggcgcaatatgattaacacctggcgcattgcagcaacctatcacctgctgtcctaaactaccggacagctatcctccggttacaaccaccgaaggagctctctaagaacgtatttatgccaacactttcacctacaggatatcaatttttttcgctatgtatgacacagaagatttgcaggaaatttgaatgtccggtacacttgatccgcttacacacaatgtcggtagagcacgctcccaagatttgaaccgctcacctaaggccttcctctacatcgcgtatgctatgcggcgttcgaggtctgagattttgaacccggcaagcttgattttcatcggacagatcaaatgtcgattttgagggctaaagtattataaaatacttataatcaaaatattttacctacgatatttttatactagaacatttaccgttgccgtacgcttgacaaaaggaccgcacttatttttataaataattatctatcaataatttgttgttttcaaaaagaacagtacaaccgtgggttcgggagttggaatgtgttctggggtgctggaaatagcggcgatttcaagcatcaaaggactttttccgggcaaaagtattattttttaatatgttaatagaaaataacatacaccaataatactcatgcgttggtggctgaaccacatcctcctccggctggagaaaaagggtctgttttcttccgggatgtccggacgcaccaaggccgccccccttctccgagagggagcggccctggaaagatcaggatttccgggagtccctatttggcaggcttgaacggcttgggggacgcgtagacttcatagtccttgatgcggccgttttcccggttctggcgcggcaggtagcggaagccggagagcttctgcaccttgcccaggtccagcacgatcatgtgcgggtgcgtggggttgtctccctgccacttggtgtgccagtaggtggtgggctggttgtccatcaccaggcccgcctgggcggcttcccccgccgtttcatgggaatccgcatagaccacggaccactgttcgcggggaagcaggttgccggaggcatccaggaaattcagctccgcaatggcggcgtgcggaccgttgtcatgggcgttcttgctgacgagggcgatgtagcgggcctggacgggagcgcggaatttgatttcctgctggtccgcccccttggcgaaggttcccttgtgcacgagctggctggcagcgggagctacgggcttgcccacacggaagacgtccgccatggcgggatccctgttgacttcgtaaatggcttccttcacgcctttcaccgtgccggagccgccgtccacgtccagcaccacgatttcatttttccccggtttcaggtattcgccggggcagtaaagcgcctgctgggagccgatgaaccagaagcggcccagattgtggccgttcacccacacgacgcctttcttccagccgtcccgcatgtccaggtaggtatccttggggttggagacgttgaaatatccacggtggaacacgggctggtcgccgcccggcttcttgccggagaaggagaggagctccacgcccttgcaagggaggttgtagatgaggaatttttccagctttttcccgtccagcgtgatggggccgcgtattcccttgcgttctccctggatttggccgccgaagttgatgcggcccatgttttccacaaagatatccaccgtatggaggcccgcgggaatgaccacgtcacaggcgtcctgcttgtagcggcggtccgccgcaccctgccttttgccgtccacgtaaacgatggcgcggtcctgcatgttgttcattttcagctctcccttcaccgggccgttcaccttcgtgcggtacaggatgaagcccaggctctgccccagggcttccatgtgaacgggttccttgcggatgacaggctgcgggagccggttgaacatgccggctttctccgtgaacgtgatgggcggcagctccatcatttccggctgcgcgggcggttccgggagcttgtacgtatcaccgtaatagtcctgaatggtctggcggaaggtacggtaacggtccgtcagggttccgttttcagagatgggcgcgccgtagtcgtaattggtcacgtccggcgtgtaggccccttcccagttcgccccgttcatgaagccgaaggaggtgcccccgtgcgccatgaagaggttgggggagacgttgttttccagcatccacttcaagtcgcggttgaagccttccgtactgccgccgtttttgggcttgccccagtggtcaaaccagcctacccagaattcgccgttgatgcggggagtcttgcccttgtgcttttccaggttggcaaaggcgcccttggctccgccgccgaagttcatggcgggaacgatgccgggcagcgtgccgttgttgatcatccagtcattcgggccgtccgaggtaaagggaaccacgcccggaagctccttctggatgacttccaggtgttttttcacgtagtccttgtcggagccgtaggagccgtattcattttccacctgggccatgatgatggggccgcccttggtgatctggagcggttccagcatggagcagactttcttgagataagccatggccggttccaggaagcgggggtcctgggaacggactttcaggtccgcatccttcagcagccagccgggaaagccgccgaattcccattccgcgcaaacgtagggccccggacgcacgatgacccacaggccggctttctgcgcctccttgatgaattccacaaagtccaggttgccggagaagtcccacttgcccggttccggttcatggacgttccagaacagataggtgcagacggtgttcatgcccatggccttcatgcgctggaacctgtcctgccagtgctcgcgcggcacgcgcgggtagtgcatttccccggagatgattttgacgggctttccatccatcaggaagttttcctggttggtggcaaagacatgcttggctccgtcattggattccggcaggggcatgggagcggccatgcaaagatgccctgccagaagaagaacggaaaaaagtgataatttcatgatgatggagtcaataaacggttacagagaatcaggggaattatgatgaaaaaccgcctcctttcaatttaaaaaggagccggcgggctggttttattacggagcggcgtcatccggtctttcaacacgtatcacctgatgcctttcctcaaacggaacgccccggcgccgggcctcctgcgtttccttcttcattttttcatccacccagtacaggtgggattccagggggttgtaaatccggggggaacagaaccgcgtgggggattccggccagcgtatccagcgccagcaggcgacgtacgtgtagggttcccgccagccgggaatccagacgcagagttcatgaatgcgcttttgggcgcggtgaagggcttttttcagggcggcgtcatccggggcattccgctccgcgttcagggccgcatccagttccgtgtccgccacggcaaagatattgttcgtgttgcccacggggttgccgcgggcatcgtacgccagctcggaagcaaaggtttcatacagccgggggaacggcgtctggagcggccacgcccacagggcggcctggtaccgtttttcaaataccttccgggaacagacattataggtcagggggtccaggcgcaggtccaccccgcatttcagggcctcctgccggagaatggaacagacgttggtcatcagggtggaggagtccgcgaaggtcagttccaccaccagccgttccccccgttcattcttcagcacgccgtcttcccccatttcccggtagccggcgcgggcaaaatattccatggcttttttcttgctgtattccggcgctttcagcggaagcgtcagatcgccgtacccctccatgtaggagcccagccttctcatattcccgcggaacagggtatcaatcaccatgcccatgttcacggaatgcgccagccccctgcgaatgccggcgtttttcagaagcttgtccgcacagttcagatacaggccgtacggggggcaggcataaccggcttccaggctgtacttgtctatgtagccccagtgcacttccggcagttccagcctgttttcccacacttccggcttgcggacgttcatcatgtccagctccccgcggcggaacatttcaaccgccttgttttccaggtttacaaatacatgctccacctggtccgcattgcaggaatagcggtagtatttcctgtccttcgcccaccagtccttcacgcgggccagggtaatgcgctcgcctatccgtattttaccgggaaccaccacgtagccccccgtattcgggggcgccttccactggtagcgttccagaaacagggagttgaaatcatggtaaaaaccgggatgggccggatggaaatccacgcaggccatgtaaggcagcagcggcccgggtgacggaagcgtcagggcaatgacggaatccccgtataccgtaatctggtcatacgtggaacggaacagggtggtccagaaggggtcccgggcaaagccggacgtgcggaggcagatattcagcaggaagtcctgcgcccttacggggcggccgtccgagtacgtcgcttccgggtccagatggtaaaaaacggttttcccgtccgcggagacggcccagcggtccgccagccccggaatgggccggaaggtttccggatgcagccccaccaggggaagccacacgttgtcaatggcggagtagttgaaaaaggtctcgcttcccggtccgaacgcccgcagggttccgggaaacggcgtattgatccacagccggaccagcccccctttcacggcgcgggggtcacctacttccggttcctccattccggtctgccattccaatccagcaggaacctcctccaggggaagctggcggatatggtctttcagctccagccttctgccgatgcgttccacggaacgctcctgctcggccagacgccgcccatccccatcgccacgggagacggacagcaggcttttcttccgctcgccgcctgccagttcccggagcagttcccgttccacggacctgttccaccgttccacgaagccgtcaaacacggcaggcatgcccctgccgtccgtccgtccggaggcctcatgccaaacgtccgcttcccgctgggcgaagtaaaggactcctcccagaaagacggcgaggaccaacgcccccagaatgtacagccagcgaaacacagcttagattaccgccgcatgttaaccgattccggaaccaccggaaaacaaaaagcccatcttccgcccgtggctgttcccttcgcctgaaacagcccgcaagacggaagatgggggcgcaatcaacaattagtcctgaaaagcaattagaattcgaccgtcacaccgccgaagactcccagcccccgggcctggcgcggtccgaagttatagtcattcgtgatgatgaaattctggtcgaacaggttttccacacgcacatggagcgccacattgtccgtcacctggtacctggcgaacaaacgcgccgtaaagaagttgtccagccgggcatagttgtagtccgtacggcccatggcggacgttacgccgaagccgaccgtcagtttttcaaccggagaggtataaacctccgcgttgatggtgtggcgggcggtattggccatctggatggtttcatagttgccgatggagtcgcgcttgggcatcgtgaaggtgtagttggcataatagccgctgttccacgcatccttgaactgccccttgaacgctacttccacgccataggaagtggcgtgggagaagttgtcgtaagtcgtgtaggagttgggccacgtgcctacgctcctggtgccgatttcatcgttgatgcgggtccagaatcccgtcacggaagcgtaatggttgtccgccaggcgctgttccacgcccaggtctccgcccagggatttggacacatccaggtccggattgcccacgtagccgtaattggcggcgtactgttcaaagtaggtgggggcgcggaagccggaacccacggaaccgaaaatacgggtgggggaatccttgcccgtcaccttccaggaattggaataacgccacgtgaagtggttgttccagacggaatcatgctccaggcgcagggccacgctggcgtcaaagttgtccgtgggcgcccacatctgctccgcaaagaaggcaagcgtgctctgccattcatccttggccacgtaattgttttcgctcatgtagtcggagcggtcccaggccatgccggagaccgtcttccattccttgttccacgtaagtgcattgcgccattccgtctggaagcggcggttgcgcatcacgttgggctggaaatcgaagcccggcgtatgcgtggaatagtccatgttgtaatgcccgatcataaagctggtggaccacagcttggtaatttccgcatccacgcgccccgtcaccaggttgctgcggttcttgtcttccgtgttgtacaggtgggggtccgtcacggcgggccactggtcgtaatccacatatggcgtggggtattcaaagtaggagtccaggcggcggtaggtaaagcccaccttcaccttgtcattgacgtcatagcccaggcgcacggcttcctgccactggcggaagtcgttcatgcctttccggttgtcataaatggccggataaatggtgggatcgttttccgtggattcaaaccccacgcctacaaagtaggaaagcttcttgatcttgcctgaggaagtcgcgtagctgttgaaggaatggaaagaaccggcttccgcaaaaatcctggtcacgggatcgccttccccttccggggtgtccatggcgacaacgccgccaatggcgccggaaccgaagacggcgccctgggcgcccttcaccacttccacattgtccaccgtaaagagattggtgatccccagcagcttgttgccggacatgttgacatcactgatgcgcatgccgtcaaccatggtcagggtgtaggtttccttgttcatcccgcggatgacggtgttgctcacggaaccgcgctgccaggtgccgccgccgtccagcgtgaagacgccgggagtctgggaaagggctcctgtcagggtttcaatgcccgccttctggaattcttccggattgatgatggaaacggatatcccggaccggttgtacggcacgcccgtaaagtgggacgccatggtcaattccggcatgacctgcatggtttccgaactggcggagggcttggagtcttcttttttagcggactcggcaagagaggactggcctgcgaatgcggcaaggccaacggcaatagcgcccatctgaagggctttcttcgtataaagcatggttgtggtgccttacgttcggtaactcgccgaacagttggacaaccccacaggctggtcttctggcttgcgagacaggctcgcttacagtggcggtaccgctccggattcacaccggtattccccaatctatttcctgcccggctacgggcgtccctgaggtctgtaacccttcccataagggttcatgagacggatgaaataccaaagagaccggtatgacaagccaaaaaaatttttctttgaacattccgccgctttgcggacgcttcctcttttcagccgccgcacgccatcccgtttttccaaccggagttctccatttttgtcttgtcacccccggcgcgtacaggacatgatgcgcccatgacgcgcctttcaccctccttcccgcagcggggaaggatttccgttttcagcggagttcccaactcccggaaaaactgtttcttcaaggcgtttccttccttttcccggcacgcgcggacgtccggaattccggtctctactactacggcatgaacagtttttcacacggaggggatttaaaatccctggcggcggacgccggacggcccgaacgggagattctggatttcagcgtcaacctgaggccggagggaatgccggagttcattgcctccgcgctgtggaaggccatggatgcagccgttccctacccctccccggacatggcggagctgcgggaactggcggcggttcattacgggctgccttccggttgcttcaccttcggcaacggagccaacgaactgattcacgccctcccgcgcgcgctggaactgaaacgggccgttattccggaacccgctttttccgaatacaggctggcctgcctgcgccatggcacagacgttctttccatccggacggaagaacggaattcctttattccgtcacccctcctgacggcggaacaggccgcaggcggaagcgccgttttcctggcgaatccctgtaatccgtccggcggcctgctggacgttccggccctgcgccaggccgtgcgggaccgccccggagtcatctggattattgacgaatctttcattgactatgcggacggaacggaatcgcttctccgtgacgcggcccttctgcccaacctggttgtcctgcgttctctgaccaaattttacggcatcgccggtatccggtgcggcttttccgtctgcgccgctccgctggcggaacggctgaggcagtccctgcccgcgtggaacgtgaacgcctttgcggcggcggcggcgcgggccgtgctggaacagccgccttcatgggcggacggagaacgctccctgaaccgggaacgccgggaagacctgttccgcaggctttccgccctgccgggggccgcagtactcccgtccggagccaacttcctgctcttccgcctggcgggggcgccttccggcctggccgcccggctcctgaaaaaccacggcatcgcgctgcgcgactgctccaattatccggggctggaaaacggcggctggttccgtgcaggcgttcgcacgccggaggaacacgccctgctggcagaggccctgcgggccgagctgaagggcgacggccccgccattctccgcaaactgcccaaaccggccctgatgattcagggcacctgctccgatgctggaaaaagcgtgctcacggcggccctgtgccgcatttttcttcaggacggccaccgggtggccccgttcaaggcgcagaacatggccctcaactccggcgtgaccgcgctgggggaggaaatgggccgcgcccagatggtgcaggcccaggcctgccgcatcgacccggatgccaggatgaaccccatcctgctcaagccccattccaacaccggctcccaggtgatcgtgctggggcgcgccgtgggccacatggaggcgcgggaatattttacggccaaaaggcgcttctggccggacgtgcgccgggcgtacgattccctggcggacgagtatgacgtcctgtgcctggaaggggccggaagccccggagaaatcaacctgaaatccgcagacgtggtgaacatgaacatggcccgctacgcgcgcgccaaagttctgctcaccggggacattgaccggggcggcgtgtacgcctccttcctggggacgtggatgacgttcaccccctgggaaaaagagctgctggcgggttttgtggtcaacaagttccgcggagacccggagctgctggccccggcacacagctacatgctggaccgtacaggcaagcccgtgctgggcgtcatcccgatgatacggaacatcagcattccggaagaggaccgggccgcgctgccctttgaacaggacgggcaagccaagcacgcggacagcctggacgtggccgtagtgatgcccgcccatgtctccaacttcacggacttcgccccgctggcggcggagccggacgttcgcctccgccaggtgcggactcgggaggaatgggggaacccggacctggtcatcctgcccggcaccaagagcgtggcggcggacctggccggactgcgcgccgcggggatggaagaacccatccgccggcacgctgaacagggaaagtggatgctgggcgtctgcggcggcctgcaaatgctgggaacggacattctggaccctctgcacatggaatccgcagaggaacagacgccggggctggggttgctggaactttccaccaccttcgccgccgccaaaaccctgctcaacgtgcgccgggcaagcacgccgctggcccctcccgcggcgggctatgaaatccaccacggcgtcacccgccatgagggagcgagcatccccatcatgttccgggaagacggctccccctgcggctacggcaaaggccgcatctgggccacgtacctgcacggcattctggacggcgaccagttccgccgcgcgttcatcaacatggtcagagtggattccgggttgtctcccaatccatccctgcacgcctcctatgacctggacggcgcgctggaccgcctggcggacgtagtccgggagcatgtggacctcaaggccatctaccgtattcttcaactgaaacgctgacccatgcttccgtgcccgttcatcctgcctgcggcccttctgctggatattctggcgggggacccgcccaacaggttccatcccgtctgcctgatcggctggtgcgcgcgtcgcgcggaaaccctggcgcggcggctgtggggagggacttttacggcggggatggcggcggctttaggaacctgcgccgccgcatggcttgcctgcgcggtatttttccttctattttccctctcatcctccctatggattccctggattccggccgttctggtcatttacatctgcatggccccgcgcggcctggcggaacatgcgctgcgggtggcgaacgccctgcgcagcgggaaggacggcgaggcgcggcacgccgtttccatgatcgtagggagggacacggaacggctggaccgtcacggcatggccagggcggccattgaaagcgtggcggaaaatctgacggacggcgtcttttccaccttgttctgggctacagcaggctgtttggcaggaggtcctttcggcgcggccttcgccgcgctgacgcaccgcgttttcaatattctggatgccatgtggggaaagaagaacgaccggtacagacgcttcggcacctttgccgcccgcacggacgatgcgctcaactttatccccgcgcgcctcatcctgccgtgcatttccctggcggccctcttcgtgaagggaacctccgcccggagggcgctcactacgggctgggccttccgccgcgcccatgccagcccaaactccgcctggagcgaggcggccttcgcgggcgcgctgggcctccgcatcggcggtccggtctcctacaaggggattcctgcggactatccgtggataggaaccgggcgcacggaagccaccgtcagtgacctggccctggccatacgcctcatgtggataaccgccgccgcgggcacgctgatcttctccctcatccttttcttcattaccctcttctgaccatcatgaacaaactgcatattcccccgctggacgaacaggccgccaaaaccgccctggaacatcagaaaatactggccaagccccccctcgcgctggggaagctggaacccgtagccatccagattgccgccatgaccggcaatcccgcgccgcgcctgaaggacaaggccgtggtcctcttcgccgcggaccaccacattgccgaccacggcctcagcctgacatccacggacgtcacttacatccagacccgcaacttccttcaaggcggcggcaccatcaacgccttcacgcgcaacgcgggagcccgcctctccgtggtggacgtgggcgtgaattacgacttcggcgacctgccggggctggtgaaaagaaaggtcatgcacggagccaacgatttcagcaggggcccggccatgacgagggaacaggcgctggaatgcctgcaagtgggcatcgacatggcccgggaggaaaaagccagggggctggacatcgtggccgccggagaaatgggcatcggcaataccacgccctcttccgccatcgtgtccgtgctcacgggcaccccggtggaaaccgtgacggggcgcggctccggcgtcaagggagaagtcatccgtaaaaaaatagagcttatcgaacagggaatcgccctgaacaagcccgacccttccgacgccatcgacgtgctggcgaaggtaggaggaccggaaataggggccatggccgggctgatgctgggcgcggcctccctgcgcgtccccatcgtcattgacggcttcattgccggggcggcggctgccatcgcccagggcatacgcccggaagcggctcagtacttcatcggctcccacaactccgcggaaccggggcacaagctcatcatggaccacatcggcgtcaccatgtacatggacctgggcctctgcctgggggaaggcacgggagcggccctgttctttccgctgctggacgccgccacgcgcgtgctgtctgaaatgaaaaccctgccggaactggacatcaccgttccgcgctaaatattccctttccctgcaccatggccgtcattaccaccatccgctccgccttcggcttcctgacccggctgcccgtaggcccgtggccgctgcaaaacgacctgaacggcatctccgcatggctcccgctggtcggcctcgtcgtgggagggctggcaggcggcctcacctgggcggccaccctgctcttccccccgctggtctgcggcgtcatcggctgcgcctgctgggtagccatcacgggcggcctgcatctggacggagtggcggactgcggggacggactgcccgtggaagtgccgagggaacgcaggctggaaatcatgaaagactcccgcctgggcaccttcggcggcacggccctgttctttaacctggccttcaagggcgccgcgctggcggctttggcggccttcggttcatgggagcttctgctcacggcgtgcgcgctggccgggctgctggcccgcagccagatcttcatcgccatgcgctttccgggcgcgcgccccggcggcatgggggaagccttcaagcaggggacgcgcccagtccacgccctgatagccgccgccgtcaccctggctgcctgcgcgctggcagggtggcacgggctgtacgcgctgcttgccgccctggccggttccacggcgttgctcctgtatgcccgccgccgcctgggaggcgtcaccggagacgtgttcggctgcaccgtggaatgcacggaatggctcgtcctgctcaccttctgcaccttatgaaaactccgcacaaatgccgcgttccgggcctcagcattggctgcacctccttcatcatcccggactactacgtccccgccatcagggaatgcgtccattacgcggatgacattgccctgctcctgctggaagccggagaccacggggagggactcattaccccggcggaaatccgggagctggccggaatcgccgcggatgcaggggtcaagtggaacgtccacctgcccacggatggcggcttcgccacggaggaatcagggcgccgctacacggaaaacatcatccgagccattgacctgacccgagaactggagccccacacgtgggtcatgcacgtggttacggaccacattcccggtccggacatgcgcccctatcttacggagcgtgaaacggaaagcatcctccgcagcctggagcaaatcacgccccacctgcccgcgccggaatgcctggccctggaaaacctggaacgccacccgaccgactacctggacaagctggtctccgccacgccccattcccgctgctttgacataggccatgtctggaaggaaggcctgcggccggaagaactgctgccgctctggctgccggacatacgcatgtgccacctgcacgggctggaaaaacgggaccacaaatccctgcaccacatgcccgccgccacgctggacgccatcctccaccccatgtgggacatccgtttctcccccctcatcactctggaagtcttcagcctggacgactttctgaactcccaccaagccatgctggaatcccatgaacgctacatctccaaacactgacgccaatcccgcacgcatgacgctcgtcctgggcggcatcagaagcggcaaaagccaatacgccgaacagatagccgccggattcggggaaaaaatcctgtacgtcgccacggcggaggtgtggcccggagccggatccatggaataccgcgtgcgcaagcaccgggaacggcgcccggcaagctggcttacgctggaatgtccccgccatgtggccgccgccgtccgggaatccggcctgctggaccaggtggacggcgtcattctggaatgcgtcaccctgctcgcctccaataccctgtacgcccagaaggaccctacgaactacgagccgttccaggaagcgctgattgaggaaatagaggccttgaaggaacttatcccccaatcccccgtgccctgggttctggtctcctctgaaaccggcatgggcatcagccaggcggacgcggaaacgcgccactactgcgacgggcttggcatcgccaaccagcttctagccaaaagcgcggacgaagtttacttcatggttgcggggcttcccgtaaccgtaaaaaaatagcagacggtcaattcttcagcgcaatatacttcaacactgccggacacatccgcgccagtaaaaagtacagtccgctcagagccagaaaaacaaggggtacggccattccccatatccagaagcttccccttggaaaaccgagcctgagcatgcactcataaaccagggcatgcgcggcatatacaaaaaagacggagggagccaaacgggcgcagaaagaggagattcccggaaaataccgcatcatcaagaaggcgcaggatgccagccacagcacgcccatgcacaaggataacgcagactcctgaacggtgctgtacatttcccatataaaaataacgggaaacaccatcagcacgtacagccacgctttaccgaccgcattcttcaactcttcaagggaataacggcacaaaaacatgccaagggcaaatgctccaaaacccctgggatggataacgcagaaaaccttgtccatgtattcgaaggacaagtaaagggaattgctcgtactgaaaagcaccagggaggccatggacagaatgagcagacaggcccgcggcatccggaataacgctcctgaaaccagcacaaacaccattaaatcccgcaaaaaccataaaacagttcccaaaggagggcgccctattcccagaccggtcatccattttacaatgtccgcgggaaacccgaacaaggccatggaaacgaaaatccaaaataaataggcacacagaatcagaaacgcttttctccagttaagccagggcaccgaggccgggctgcccccatacttccgggccaggaagtaacccgccgccatgaaaaagaaaaatacgcccgcacgtgttgcatacacagtgaagccatgagaagcgggagtatgctggatcatgataagcaacatggccagcacacggataatatctacccacgggtcacggcacttctccgtcagtttccttccccggacgatgcccggcgcatgtgaaggagagttcgttaacgcttcatacatatgccaaatacaataacgaacatccggggcgccatgatagcacggccgttcttcatggcaatacgaaacagggagccaaacgcaagaaaaagttccaattgacagggtccggaggatatgttaggcatgccatgcctccctcaccaaccggaggcgcttccgggaagcccgtggtacgggcaggaaatagatggggaatccggtgtgaatccggagcggtaccgccactgtatattgcacggcttaaaaacctgcaatgagccagatcgccagccccgaagtattttatgaaccgccggcgagtattccggcattcagaccatacacatgcattcatccaacacgctccgcttgaacggagcagactatgatggtccggcctccttgaagtccggaatgttcaacactcctgaaaaaacaccgtgccacgccaggcaccggatgcaggctgtggctatgaccctggcctgcctcggcatgctgggaacggtccatgcccaggatactgccagggaagacctggccggcgcttatgacgccactgtagccagaaccgcctcagatgcggccctgggaacggtctccgccacattcaacgtgacaggctccagcaacgtgcgcggaatctggggaaaatcaggcaccctcagcattggcgcgattgccggggatgccgtattcaacgtctcctccacggcaaacaacgccttcggcattgacacctcctccggagtcaatgtggacatcggcaccctggcaggaacattcaacatctccgcagccagaacgaatgccaccggcatccggagctacgggaaaatactctccatcggaacgatcacggaagacgccctcatctccatcacggccaatttctcctccaatggcatttacgcctatcaggggcgcctggacattggaacgatggccggcaaaatctccgtggacctgggaacaggaaactatgcgaggggactgtatgcctacggaaataccatggactaccagggcccgcgctacaaggacgtcaacatcggcaccttttcctccaccggcagcatttccgcggcgacggccggcggctacggagccagaggcatccagtccaactacgggcaggtgaacattacccggctggacggtcaaatcaccgcagcctccggctccaatgatgaaagcgaggacttttccgccatcggcattgaagccagggaaaacatcacgctgggcgacatgggagcaacgggaagcgttaccgccacgaccaacggcatggacgcctacggcctcttcgccggagaagaagggggttaccagacccattccaatattaccatcggcaatgtgggcggcgccatccgggcggaagccatggccggaacggccgccggggcacgttccacgggctccttgtccgtgggaaacgtcagcggtttcatctccgcctcctccacgggagctgcggaagcctacgggctgctggcggaattctccctgaccaccggcactatcaacggaaccgtcagcgcggcaactgccggcagcacggcggcggccctgatgggaggagccggcatcacgacgaccatcggttccaccggcgtcattgaagcaacggcgacggggaacgaagcaacggggtatgccctgtacagcgggtccaatacgggttccggcttctccacggaaaacacggcggacaacgtcaccgtccacgccggagcttccatcagcggcatctgggaactgggcggctccggagcggaaggctccgtggataccattacgctgctgtccggaacggaagccgctccgggactgtttgactatacggtgcggacaaccgtcaacaccagcaagtccgatacggccacccaccattcctccgtcacgctcaacgtgggcagtgcggacaacgaagcgaactggaccatctccacggaaaaaactgtcggcctgttcaaccgggtcaacgtgggccacggctctgccgtcaccttgaccgggaactcccagatactccgtgacggggccgtcgtcaacaaccagggctccatctccggcagcggcacgctcaccattgcggaaggcatgacgctgctcaacggaaccctggtgcagaatgcggcgggaacggccctggaagtgggctttgacggcctgaacgtaaatctggacctggcgcaaaacgccacggtaggtgccacggtgctcaacgccacggattccgcctgggtcgtcacgctggaccagatcaaaaacggcatcaccgccatgtacggagccagggtggacaacttccaactggaaaactaccgcatgagctaccgcctccagggccaggtattcctgggtgaaggcgcccccatcgtcgtcaaccccggagaaagcatccatgtgggggaaggctccaaggtcatcatcggggaaaacctgcctgagcacggcatcgtgctggaaggaggggaggctgacttgagccagtcggacgccgtcatttcctccggagccgtcagcggcgcttccggccaactgacgctggcgggcaaggatgaaaaagaacagaccctgaactgggaacactccggcacggcaggctacagcgcctccgccgccgacggaggcgccttcgcgaacctcaacgtcacggcacaggatgtgaaggttgtcgccaagggttcctatgcggcggaaaacgtcgtcatcagcaacaacgccaccctcgttctggacggcaggaacgccagtctgggcgtggaaggcgggaggatccgcctgggtgaggcattcgcccatccggctaatccggggcatctggtgctgaacggctccaccgttctatccggcgtggaaaccaacagcggttccaccgtctccggttccggcgccttcaagggagaggttacctattacggcagtgaaatcgtgatcggctccggctcctccgcaggctaccacaactatgaaggcggcctgaacgcgtgggggggagtgcaggaactcacgttcatcgtgaacggaacggcggcggcggacgccgcccataccggagcggacacctattcccaaatgaacgtctcttcctcctaccatgtggatggagcgcacgtcaatgtggtcatcggggacaacctgctcttcagcaaggaacaaagcttctccctgtccctggtcaacctggactcggacaccgtcattgatccggacggttccctgtgggacctgaccagcatcgaccccacgctgaagggccgcacggacctggtcacggataccagcttcacggtttccggcgacgggctgcacctgatcttcaacggcaaggtcaacatcaacgccgtgaaagccctgcgcggagaagaagcctcccgcattgccaacacgctgtggtcctccgtccgggtggtggacagcttcgcccatacggcggcttcccaactggatttccgcggaccgggcaggcgcaacatctggttctccgggctgggggacttcatgaacgtttcctccgccacgggagcctccggctttgactacaagggcggcggttatgccgtaggcctggactacgcctggacgaaaaactggatatccggcgcggccttcggccagaccttcggttgcttccactccgcggacaagcagttcaaggcgaaccaggacggcctgatgctggccctctaccagcgttaccaccgcgacctgctccgaggaaacagcgtggacattgacggctacttcacctacggccgcatggacaacgatgcggacggcacgctgggcggcagacccgccaccgcctcctggaacgatgacgtgtacggcttcggcctgaagggaacctggaacatccgcctgagcagcacggatgtgctgaaacccttcgcaggcattgaattcctgcacggctccaagggatccttcggggagcattccggttccggcaccgcttggtaccaggacggctccgtgcagaactggagcatccccgccggcgtcacctggcagaagcagatcgccgtcggcaggggccagtacctgctgccgcagatgacggttgcctacgccggagacgtctcccgccgcaacgcttccgtgaaaacggacgccttcggcacgcccttccgggtagacggcgtccatccgggacgccacgccctgatcgtccatgcggggctgaactgggtcatttccagcgcctggagcgccggaaccttctaccatctggaacagagggaacacatgaccaaccagagcgttaacgccaccgtgcgctattcgttctaaacgttcttcccattcggaaacattccggagggaatccaccgcggattccctccgttttttcggcaggcttcccacattccacaggaaattcttgactccacagccctcttgccgcttaattcttccacttcacgtgccgtcgtggcggaatggtagacgcgctcgactcaaaatcgagttccaaaagagtgtgggttcgagtcccaccggcggtaccaataaataaaccctgaaagcttaatgctttcagggttttcttttatcagttaacagctctcggttaagaagcagaaaactgaatgcaataatttccagaagaaacactcgtgtgtttatatagatataatttctgaaactttttccggaacactatatctataaataaaatcatcagtaattacatactttatattaaaaattattctactgtaattttccaatattcgccctcgcgatgtaattttacatgcaacaaatgaactagtctttctgcttccctgcaaaaatctcctacaatatcgtcatgggattctcgttgttgaagatgccaccaatggtattccatttccggaatcaatccaaattcatccacccctgtatagtttccaagtaaatctgataaatgctgaagcatgtctttttcagattctactcctcctttcaaaccacagacaacatcttgaagacatccaagacaataaagcctaacggcatccttgccttttggaggaattattctggcggctgaggcaaatgctcggagatcgtccttcaactcaaaataattaattgaaggctctccaaaatgcgaactcaacaaaaacagggcttcgtccatttcttcgcccagggaattatgtaaagaattaattgcccatttcacataatcatttaaatcttccaaaaagactccttcaaaggccagtacctgcttgcttgttggccgtgcaaggagagcttcaatcatgtttttttcaatctttgccattaattaattctttttattataaagccataactcctcctacaatagcaccaattgggacagtaccgatttcctccggtaatgcaatttgaggccccaattgtccaccaatgagagcagctagcactcctgcaaatgcaccttcccaaaatgcatcccatccactgccaaccggttcttgcacaggcccaggatccgaaattagaacttgaaatggtccaggatcagtaagcaacgccacttcgtctatccattcacgtactacttccaattcaggatgtatcgtaatgaatttattattaattattttatagaaataatcttagtgcagttcaccgcatttaacctagctttcaaaaattccgtacgatggttatcccatggttcttttgtaccatactttctccaataatctgtaaaatctctttcacgacgtgttttggatgccgtgaaccattggaaaaatctttttatattctcttgacaacactctccaaaggaacacgatttgacagtaggatgttttccatcaaatggacctctttctattaaaccaagtaaatcaacaagcttgaccgaattattgagaatcattctataaacattattccctatcttttcagcaataggatatctattgatccacctgccgtcagctgaattgtaatgacgataattataataggcgagagtaagttcctcatcacaatattcgctactccactgcataggttgaatcacatctcctgtccatgccttttccctggagaggagcttatggacggaaacagactatttgcggacaagggaaaatatctcgggaaaaagtacggaaagttcagagtgaggaaggagattcgctcttggatgatcggacagggattgacgataaactccggaaagttttccgtagttgttgtccaggaagtatacccggcatccggcaagcagacctgcaatgcagatgtgcagacggtctgaaatgacgatgtccaattccttcagaatagagagaaggccccctattagaaaagcctgctcggcagaaccgtcgccccagccattccaaagatcggaaatatcacgtcccaggatcaattccgcaggcagggcgctctccttgccccggcgcggcagaaaagccccctgctgccagtaattttcgcggaatgcgcagaaagaagattcctgcacggattcccggattttttccaggagggaaaccgcccatggttccggacaagcgggagttcccttttcttccaggataaaagacggcaaggaattagggcagaagtaaagagccatgtcgtccgccgggagaaattgcgcccgctcattgagcgaaaggcaataatccagggaacgctgttcccggcaaaagaccaggtgcctttcatcaaaggaacgaataagagaatctacctgataaaagctgtgcgggaggataatgcaccgttccactgagcgggccgtcagttcctctttctgctcatccagagaaccgtaaaaggacacgaaccttccgccaccgccatacaccacatgccgatgaggtttttcctgcgccggcagatgatggcgacggaaaaactgccgcgtggcgatgtcaataagcaaatctcctatgttgccatggttggcgcaatattgaaatccacccagtttaatgagagcaggaagaatggaaatggattcaggcatgcggtatgatttcaaaaaattcgttaagagtgcccaggcaatccctggaagaaacgtgtggcacttccagtcccatcttgcgccagacgcagatctggtggagaagctccgttccggagccttcgcagatgttatggaatccgttgacgaataatcgtttaattggaatattcataattgtatagggaattgcaatgaataaggaaaagagatggtccatgctcctgacgaatatggcgaatccggacgtgctgaatctctcgttgtgcggttaaaaaatgagctgcatgcagcgacgcctgctccattcggagcatccatgcctattggcgtaaaacggaaagttcccgccttcgggcatccccccttgaacgagaacggatggactgcctgctattgacggctatccgtaaaatgtttgaaaaacgccaccgcccccgcttccggaattgtaaattctggataatttgcgttggtgaacagtttacgggctccccggccattgacagcttccacggtcagggtaaccgcttccactgttttgaccatgtcttcactaccctccgtggatgtgccggtcatgcacatatccagcctcgcccatgcctgaacggccttccattcgtcagacaggacgataagggcggacactacttcggaaaaagcctgcaactgttccggcgtcagctcccggtgcctgtagcgctgattctgaacaaaccccgccatatccgggaaaacggcagtcaacgtgaattcatcccacttgccgggtcgcgggaaataaaattgtaattctttcatgttaaattgtttctattttaagatagtcagccggattaatcccttggatgacgcttaccctgaacatggccatctctgcggagcaagtatctataatagcgtagtggacgtcattgctgacgagccccagagaaacttcccccaggtaataagcttgtggattaagatgacggcggttgaaattgtagtggttcccgtgcccggagcttatccccgtatgccgggccagataaatactgcaggtaccggatgaagagggaaccgcaatcaaatcaagccgggatacccagtccaggctcaaggcagcccaggaaagctccgttacaacctgtccgtctccggacctggccaccacttttctgctggctgcatccacataaaaaagcggtccgggaatattctccaccgttgtggcggtgacggttccggaatacccggtccagccgaatttagtttgagtcgcggccaaattcacaccggaaagcagagacatcaccagcgcatagctgccggttccggcagggctgatggctcctccgtaattggtattggtgacggcagacttgaccaggacgcatttgtgcgccgtcagcgtgcccgcccaggacagcccgcaccagtccgccaaggaacgctccatcttgacgttgcttccctccagggtggtaacggttccgttcgcatggtccagatggtacacattcctcagaacggacatgacggcgtggctgcccgcgttgaggccggtgttggaggctccggccgcaagcgcggatacggcattgataccgccgttggcattgacggttccggaaaaggtggacgcctccgccgtcagatttttcaaaacggcatcttctcccagccgaatgccgccctgggcagccaatcccagagcggctactttaaaagtctgtgttaccagtgcatgttcgtcggacacctccaccgcatccgtaggggccacaaagatatactgtccggagttttccgtttccagaacagtcaggcaagaagcatcggagagaagagcctggacagagcatgctgccgtacatgtcagcgcataagccgcgcccggtatggtattcactttcattgagcagatttagcaccggaaaagagacagtaatcatccatgctgatacgtgcatgcctcctgccacttccccggagagaggcacgccgcatgcggagccaaccggcatgaaaaaatgacaccgcttgacagaaaagataaatcaagatgtttattatgaatattttataaaataatcacaaaccacccacctgcgaacgcgggaaacatgtaatccattgataataatatatcctttacccatgatttctccactttccgacattaaaaaagaccagggactcatatttttatctagattacagaattccaacaacttaccgcaacaaggacattcacgctgaatttggctgcggaaccaatccctacaattgactcgaattcacgcaaggcagtacgtatataaaagagtatgacttcgttgcccgcatcttcattggttgaaaccgtagccaataaaatcaaacagatgatcctcagcggcagcctggtcaacatcctgcccggcgaacgggagctcgggcacagattgtccgtagggagggagaccgtcagaaaggctctggctcttctggagagggaggcatggatcgctcccgcgcgcatcaaggttccgcggcgcatcctgaaaactacggaggaaggagcgggaaaaaccgtcccctcccatcctgttcaggaaaaaaggggcattatcggctttctgacgccccagcccctcaagaggctggcgcaaagcgtgctggcggaggtgtacaccatctccaagattctggaggaagacggcatcagcgtccgcatttttgaagctccctggattttaggcaacaacccggacaagcgtctcgccaagctggtgaccaaatccgaatgcgtctgctggatactccaccgctcctcggaacagacccagctctggttcaagacgcacggcattccctgcatcgtgcgcggcacttcctaccagagcagcaacctgccctatctggaccgccactgggcggccaccacgcaccatgcggcgcagcacctctggaacaaggggcaccggaccgtcggcctgtgcctccccccggacccgttgaagggccaccagttaatgcagaagggctttttcagctttgcggaaaagggctggaaccccgtgctgattcccaccccgtttgagacgccccttttctttgaatacctcgccaaagcgttcaaggaacatccggacatgtccgccctggtagctacgcggggcaaccagatcgttcccctcctttcctgggtggaagcccgctctttaagcattccggaccagctcagcctgatcagcctgacgtatgaacccttcatggagcgcctgctgcccaccatcacttattacgaggagaaccagacaaaaacggttcacaagctcatccggatgctccgtgccctgactgcgggcaaaaacatcaagagcatctccgtcatcccggaaatctaccccgggcagtccgtctccgtgcgccacacgccgccgtccgcataaatacgctttcccggaagaaacaagggacgccatgggcataaaaaggcgcgtaaacgccatctgtgccctggtaataagccccaggctgtacagcacggatttccgcatgcctcttccgcacacaaaacccaccggaccaccggcggcgcccgccttgggagaacacctggccgccatcccggaaaagcatgaaaaccgaatagcggatgcccggcgtttccctctcttccgcccgggctgcgggagtccctccggcagaccaataatgtttgacatccctccgggctccagataggttcgactctgatttcatcccccggcccccacgctgcggaacggggctccacagaactctcccatccaccatttcccccatgaagccattgaaaggagcatgcatcatcggccagtccggcggccccaccgccgtcatcaatgccagcgcgctgggggccatccagacggccctgaaatgcgaaccggtcacccgcgtgctgggagccgccaacgggattgaaggagtgctgaaggaacgcctgttcgatatggcgcaggaagacccggaggaactggaattgctgaaatacaccccggcctctgccctgggctcctgccgctaccggatggcggatcccgccgtggatgatacggactaccgccgcctgctggaggtgttccggaagtacgatgtacgttactttttctacaacggcggcaatgattccatggatacctgcaacaagatatccaaattcatgcagcaatccggctatgaatgccgcgtgatcggaatccccaagaccattgacaacgacctttacggcacggaccactgccccggcttcggttccgccgccaaattcatcgccacctcctgcatggaggtgcaccaggatctccgcgtgtacgacaaagggcgtgtcaccatcgtggaaatcatgggccgtcacgccggatggctggccggttccgccgccctggccacttatgcgggcgccggaccggacctggtttacctgccggaagtccccttccgcatggaagaattctggcaggatgtggaccggatttacaagcgtaacgggagctgcatggtcgccgtctcggaaggggtgcaatatgcggacggccgctttgtcgcggaatccggggacagggacgtcttcggccatacgcagctgggcggactgggcgccatgctggcggaatccgtcaagcggcagaccggggccaaggtcaggagcattgaactttccctcctccagcgctgcgcctcccacgtggcctccaaaacggacattgatgaagcctacatggcggggaaagccgccgtggaagcggccgtttccggccagacggacaagatggtcgccttcgaacggagcacggaaaacggcatctactcctgcaagaccaaattgaccagcctgggagacgtggccaacgtggaaaaactcgtcccccgtgaatggatcaatacccgcggcaatggagttgaacagccgttcatcgactacgttctgcccctcatccagggagaaacggccatgcagaaggaatgctccctgccccgctttgcgaagctcaaaaaagtgctggcggacccggtacagggatagcttttttctggcagcacctttttctccattttccataacagagaggaattcagcctacccggaacttctcccggccaggtaaaacactcggccagccactagcccaaccccttttccggctcaaggcaaatacgcaggaaggagattgcataattgaccgcaactgcggcattcacgctgtttccataaggtatgtacaacttcttgaaaaagaaaaatcccggcaggaaacaggctgaatggcacggcaggggcggaagaacatgaaaaaagagaaggcggatgcaacccatgactgctttttctccagtccaagaggccttccgtgccggcttaaaaagaacaccgtaataacaggaacgatagttcccttcatcatccggaagagaaaaataaattcgggaaaggaatcggcctgtttcctcatccatgaactttattttctccattcaatttcttctccgcgcccggataattatggaaaaaaccggcttcccgtttaatctctcgataaactttccactatcatctttaacgaatttatttgcactttcttagaaatgtttgaaataaagttttaaattccattttattcattttccggtcttatattagcgcgacagaggaacatttttcccgatatttctgcaagtgccctcataaagtcagcttccttttcttttgaatataatccggccctcaatcacctttcccccagggaataaaacggaacaacaagataaacttttggttcagaaatcacctgcgccaaaactccacatcaagataaaaaacactcattgccaacaagtttaaaacttttcttcccgttatcatttatctttcaataaaagtgagctggacccgaagaaaaggctcccctggcaatccgtcccccccaaggaggagccggaacggagacggtacagaactccgggacggggatatgaatcacttttcggcttcacggggatgggaaactcctttgtgccgtttcccgttgttttgtaacccgcaattccgcaacacccttttcttccgctagccctgcgccctgtttcctctctggaagatgatggaaccggcttttcctccatattcaattgtagaataattcttttccggcatattaaattcaaatagcgggaaacaaggaaatgaaaaatcttgcaagcaagggtgaaaaaaggctaaaatgataaagagctccaaaattcgacgcctatcatttcatcatgtaaaaacggcttgtttccggatattttttcggaaactggcatgaaatcggtccccgaccagctactatccaagttttccccgcatgccatgctcgattacctgtttcaacatttttattctacgctggcaattgttgctttttttattgccatcctcattctgcgcgcctgcggcaagcgcggcaggcgctggattcccgtctccacggcgcccttcggctgcatggccttcctggtcgtctttctcctgctgacggccttcatcatctggttattcagctttttcaccacgggtcccatggtggaggacctggccttcacgcttgcatggctggcagccatggcctgcgccctggccgtcatttcacgcctgaccgaatactgcctgcagcaggacaaatccgccagcaagctttatccgggggaatcccggaagttgcttcccgtccagctccggaacaagggcatcctgctgttcgtgctgatcggcgtcatcagttgcgttattgacatcatcaccgtacccttcccggttccggaactcccgccggggtccgcgctgtctgctgccacccttgttcccctgccgcaggaagtgcccgtggaggtccatatctcctcccgtgtcaccaacaggtttttcggagaatgcgactttgacctgaccgtccgggagaaaggcggggataagcatgttttccccgccatcctgatcaatcccggcggggaaagcgccatcaccatttacaggctgcggccggaggaaaaacaacgccagggcagcttgatattcaccaatggcatgcaaagctgcctgttcaacatggataccatgcggatgaagtccctgagcggtcccgcctccaattatcccccacccacccgggaggatctggatggacaggatatggacctgcgcctggaaacggtggggctctaccaggggctttcctgcatacgcggcgcggagcatacggatacaacgcgcgcctatgttctgaaaatcctgaaggatacgcagccatgaccggaacgcctcaaaagggtcgttgacacgggctctcccgctcccttactctggatacggccaaaacagccatagccatgattaagattacagccaaaagcatcgtcaaagcaggagccagggaagaattcatcgccaccgcccgggaactggtggaaaacagccgtgcggaagccggcaacgtttcctaccacctgtatgaggacattgatgaccctaatatcctgacattcattgaagaatggaaggaccaggccgccgtggacgttcatgcggattccgagcatttccagcgcatcatcccactcctgagcgacatgacggaggaagccattgaaatttccctgtaccgggaagtgctgtaactccagcaggaaaaaccgcagccttattccctaccccttccgggaaaggcaaaagcgccccgtcccaccagggagacggggcgcaggaagcttcgcatcatttaccgtcagaatgcgaagcaaccacacccggagccccagaaatcggaatacctgggccgcgacgcattcgccgcgccctccatcagcatgaacgcggaatgcatgcagccgtgttcatggcagtgtgaggaatgccggtgctcctgctggaaaggcacgccggccctggccgccttcttcgggtccaggggagcaccgtatccgccgaacacggcaatgggggaccactcgggcagcaccggaatgggcgccgggtccaaatccttgaacggtcccgcggcataaacgattttgccgtccatgacggtcagcacggattctattcccttgatctcctcttccggaacggagaaataatcttcgctcagcacgaccatgtctgccagttgaccgggaacaatcgctccttttttccccgtctcggaggaaaaccaggtgctcccctgcgtataaagccggagggcttcctcacgggaaagacagtcttcctcccggtacatcggttctccgcccacggtcttcccggtggtcagccagtacagggaaacccatggattgtagctcgccacgcgcgtggcatccgttccggcccctacgggaatgcccatttccagcattctgcgcacgggcggcgtatgttccgccgcctccttgccgtagcggtccatgaaatattccccctggtaggccatgcggcactgcacggcaatgcccccgcccagcgccttgacgcgttccagattcttctcgtcaatggtctcgcagtggtcgaagaaccagtgcaggccgtcaaagggaatctcccggttcacttcttcatacacgtccagaaagcgggagatgctctcattgtacgtggcgtgcagccggaaaggccatttgttggcggccagcaggctgaccacccccttgagttcggattccatgtctccgggaaggtccggacgcggctccagaaagtcctcaaagtccgcggcggaaaagacgagcatttcacccgctccgttgcagcggtaataatcgtccccctctcccggcctggtcatcctgatccatttggcaaagtcctccttctcttccttgggcctttgggtaaacagattgtaggcaatccgcacggtcatttccccgcgcttgtgcagctcttcaatcacctggtagtcctccgggtaattctgatagccgcctcccgcatcaatgatgctggtcaggcccaggcggttaagttctttcatgaaatgccgggtggaattgatctggtgttccaggggcagtttgggccccttggccagcgtggcgtaaagaatggtggcgtttggccgcgcaatcagcaggccggtgggattgccctcgctgtcgtgctggatttccccgcccggagggttgggcgtatccttcgtatacccgcaggcgcgcagggcggccttgttgagcatggcgcggcagtacaggtgaagcacaaaaacgggcgtatccggcgccgcctcattaatctcctccagcgtaggcatccggcgttcggcaaactggaactcgctccagccgcccaccacgcgcacccactgtcccggcggcgttctgcgggcctgctccttgagcatgcgcatggcgtccgccagggagggcacgccgtcccagcgcagttccatattgtaattcaggccgccgcggatcacgtgcaagtgggaatcgttcaggccgggaatgacggtctttttcccggcgtcgatcacctgggtatccggccccttgtactgggcaacgtcctcgtcggaccccacggccagtatctttccatccttgacggcgacggcgcgggccatcgttccgcgttcatccagcgttgctatgttgccgtttgagatcatcaaatcggcgtaaaccttatcattgtttttcattgttttcatcatggttcggggttgttcccggaatggttccggcctgcgccctgaaaagccagggagacagaatgctgctgatcagcggcatgaatacccaggtcagcagcgccaccacacaggcgttgaacaggaaaaaggaaagccatccgggcagcacgctgcggatgggcccacccacggtaatgttcagaagaaagatgaccaggcacacgcccagataggtggccgccgccgtcttgtagcgcggcggcgtcatcatcggggtgcccggctggttcaaccaggcgtccaggccgttcatctcctggatatgggcctccccttccgtatgggctcccagcagcttcatccagcgttcgtactccggggaggaaaccagggcttttctggcggcggcgctcgcgaaacggtccaccaccacatattccccgtttccgtcggagggccgcaggacgctgatgcccacatgcccggggcagctcagcacaaaattgacgaaatcccgcatggcgtgctcaaactggccttcatgccccggcagaatatgccggcgcaccacaacggtcacttcctctgaaggattgatggcgttcatgcctgatgaatgttcagggtttttcttccggcgcgcacccccgtgttaacggagggagcgccggaaaaactctgcgggcaatcaggcgtcatgcttcaccacctgcggggacagggcggactggggagcatggtgaaccatcgtgtaggcgtactccacgcccacgccgtaagcgccgccctgctgcttgagcagattcatcagggcgtcgtaatgttccttgttcttccagtcgcgctggaactccagaagggctccgatggtcgtcagccgcgtgccgcccgcctggacgatgcgggaaagggccgccttctgggcgtccttggaggtggcgccgcagcagtcctccaccacgtaaatgttataaccgtcgccgatcatctcaatggcgggccacgtgacgcacacttccgtccagagcccggtaaggaggatattcttgcggcccgtcgccttgatggccttccggaactcgtcggaatcccaggaattcatggacgtgcgttcaatgacgtgctggcccggaaaaatatccaggagctggggccagacatagccggaaaagccctctgtttccacggccgtaatcacggtgggcacctggaacagcttggcggccttcgccagcagggtgacgttattgatcaggtcggcacggttgatgttggctacgccaaaggtcatttggggctggtggtcaatgaaaactacggcagcgtcttccggcgtgtacagctgatgataatgcgaggatatcagggacatcatcttattctccttataatctatgtttaattagtgaaatcgggaccgcaggcggtcagaaaaccgctggtccatgattggttggagaccagtttccctgtttttgttgacaccatgccagagtgtgacaaaccgttttaaggcggcaggctctcctgaaaagacagccagttctccgccggaccggaggcttccctggaaaaggcagtcatctccgcaccaaaaacgagcgcattcccggaaatcacgcctctccttcgcggaaaggaggaacggcacaggtttcccctcatctcgttccctccggaacgggaaaccagcctgtctttcctgaaaacgtcctccggctgcggaggcggcgcgttccgttacttctcttccccgtgctcgatcttcaaggcatccagaatcttctcatatccaggcagccgcctctggaaatcctgaaaattcttgtcctccttccgggtccagcccgtttccgcataagcggcaatgcgggggaacacatggcggtgcagtttgtccgcatctgcaatccattccgtccagacctggcagcccaggccgatgacgttctgctgatgttccggcttcaatcccgcgaaaacgggttcaaaggaataggatttggacagggggagcttgtcgtaacccttgttcatataagtcatatgggaggtggaattgaccacctggtgaccgtcttcaaccgccttggtggcaatcttgtcggacccgtaccagaaatggatgatggccttcccgtccagcttgcccagagcggccccctggccgccgtcattgtgcacgtcggaacccagaatctcattccatccgatcatccgtattcccttcttagccagcatgccggaaatccggttcgtaaacatgatctgaaggtccgggaaattcctgatgcccttcttcttcatgaactcctcaatgtggggcacgcccgcccagtacttcttataccgcacctcgtcgccgccgatgtggatgatgccgccgggaaacagggccgccagctctgtcatgatatcccccagaaactggtaggtccgctcgttggtggggtcaaacgcggttccgtcattgaagctcacgggaatctccgtcacgggcttggcggacaacttcaattccggataggagaacgtggcggcggcggaatgcccgggaatgtctatttccggcacaatcgttatattccggtcggccgcatagcggacgatgcgcctgatctgctcctgcgtataaaaaccttcatggggcctgccctcatacttgccgctcccccacgtctctatctccgtgtctctccgcttgctgccgatggaggtcagcttgggatactttttaatctggacgcgccatccggcatcgtcggacaaatgccagtgcaggatattcattttcagaagccccatctggtcaatcagcctcttcacctcctcctctccaaaaaaatgcctcgcttcatccagcatgaaggcgcgccacgcaaagcggggataatccagcatggaaaaaggcttctccgccacggtccagcttaccgcccccttgtccgcgccatcgtcaaaaaacgcggcaggcagcatctgcgccaggctctgtccggcgtaatacaccccttttggtgcagcagccttgatcacgatatttccgggcgccgcttccaggcggtacgcctccggtccgtactgtttcagggaagcatccttctctattcggatggcccccgttccccccatccccgccaggggcagtcctgttccgcctgataaaaactgctgcagcagacgggcctgacgctggaacccgacgtccttctcccggcacacgatgcgcgtgcctccatccagcttcacgggcttcgcctcgcttttgtccgcaatcctgacggaaacgggccggggaatgatctggtcctgcgcattcacggtcaggcagcatgctccggagagcaggaaaaggaatacaggggaaacatagcggaacatcacgtccagtatacaccgcttctgccgggagtctttccttttcttcccgctttttccttaatcccgttaaaagcggtcagggaacctcccgctccatgacacgccagcccgtccgctccgcctgaaatgccatgatgcgccccttgccttcctttttcccgcggcgtatgatggacaccatgaaaaaagacgatacgccgggcctgtttgccgccttcgcggaccggcccctggcggaccgcctgagaccggccgccctggaggaaatcgtgggccaggaccacctgctgggagagggagggcccatccggctcatggcggattccggcaagctgaccagcttcgtcctgtgggggccgcccggctgcggaaaaaccacgctggcgcgcatcctggccacgcgcacgtccatgcacttcgtcgcgctctccgccgtcttctccggcatggcggatctgaggaaagcctttgacgaggccgccaaacggcgggaatacggccagggaaccctcctcttcgtggatgaaatccaccggttcaaccgcgcccagcaggacggcttcctgccatacgtggaaaacggaaccgtcacgctcgtgggggccaccacggaaaacccctcctttgaactgaacagcgcacttctctcccgctgcaaggtcttcgtcatgcattccctggacgctccggcgctggaaagcatcattgagcgggcggaatcccttctccagcgcaagctgccgctcgctccggaggcgcgcgccaccctcattgaactggcggacggggacggccgctacctcatcaacctgatggaaagcgtctttgacctctgcaagcctgacgagacgctggacacgccggccctgctgaaaatcgtccagcagcgcgccccggtttacgacaaggaccgggagggccactacaacctcatcagcgccctgcacaagtccctgcgcggctctgatacggacgccgccctgtactgggccgcgcgcatgctccagggcggggaagacccgctctacctgctgcgccgcctcacccgcttcgccatggaggacatcagcctggcggaccccgccgcgctgcaaatggccattgccgcgtgggacacctatgaacgcctgggctctccggaaggagagctggcgatcgcggaactggtcatctacctgggctgcgcccccaaatccaacagcgcctacaccgcctggggagcggcccggaaggcggccagggaatacggctccctgatgcctccggcgcacatcctgaacgcgcccaccaaattgatgaaggagctgggctacggaaaaaattacgcgtacgaccacgacgctccggacgccttttccgggcagaactactttccggacaagatgccccgccgccagttctacaagccgccggaacggggctttgaacgggaaatcaacaagcggctggcatactgggacaaactgcgccgccagcgtgcggaagaggattccggaagctccggcacgcggagaggccggaaaaagccccccgccccggaggaacaggccccctcatgaggcatccgccggccacacggccacttccgcaatcccctgccccggcgacagccggatgcggacatacctggccttcgcctccccggagcacgcggcgaccaatccggccccgtccttcagaagaacggttttcacatccttccaggttttgccgtctttgctgacctgcaccacgggaggctgccctttccatattccggcggctttcgcctccacccggtccaggcggaattcaaactccatgtccagccgccaccatggctccctgtcttctgcggacggcacccatgcggaagcgccgtcgccatcggacgccttcatcgcgtcctgaagattggaggaagcggaacaaggcctcaaagccgccaggttcgccttctctccggctccggttccggactgcccgtaccgcgccacctgggcatccctctcctgcgcggaaaaacgcctgtagggcctctccttcgtttccgcgctcctgcccgccacgtacgccggggcgttccgggaaacaatctggatgctgtcccccttcaatcccggggaagacgccttgatgaccgttttcccggcgtaataagaccggaactcaatagccgcgcagccgtcaatgaagtcaatgtccgtcccgggcgtgaacgtgatgctcttgccggtggggaactctccggggcctgattccaccgtgagcgttaccggaacggcattggctatctgcctgccggaggcatccgccaccttcacggtcacgtgcacatcgtccgtgccgtcagccgggctgatgaccttcttgtccgcggtcagcttcacctgcgcaggcgttccctccacgggccattccggcgggggaatgtttttaaactcattcctgtaccagtaccaggccctcttgggaatgcggaagtaatccacaatgcccatgcgtccgccggagggccagatgctgccgtggtcaaaaccgcaccagaccgcctcccccgcgcgccaggcatagcgcgcccccgcctgcttgtccccggccatgtccccccagcccggcgcataagcccccggcctcctgcagctcacggaaccgtattccgtcaccatgctgggcctgccgggcgtcttcacatgggagccgtccccgttgaaggcggccatgtcccccagcttgtcgaaatcgccgcgctggcctcccccggcgcacacggggcgcgtcgggtccagctctttcaccagggcaatcagcttgccgcacagggccctggcctccggcgcatgccgggtgaaaaacggttcgttgctgatgctccagatgacgatggaagggtggttgcggaattgcagcaccatctccctcacctggcgcatgcaactctcctcaaacgcggcgcggtccttctcttccgtgggataggcgtcgcaattccagtacctgtcgtgctccttgaagccgcccatgccccagaaaatgccttcattcagcatgcacatcccctcccggtcgcaggcgtccagaaaagcctgggaatggggataatgggagccgcggatgaaattgaacccggcgtccttcatcagcagcacgtcccggcgcgctccggcgtccgtcacggcatccccccatcccgcgtggtcctggtgcacgttggctccttgcaggtaaacgggcttcccgttaatcagcatgccccggtccgccgtcagctccagggtgcggaagcccaggggattctccgcccggtccagcacttttcccccttcgcccaccagctccgtcgtcacgcggtacatgttgggaacggccggactccacagcctgggagcggccagcggaggcaggtccgtctgaacgcacgcttcctttcccgcgcccagttccacgggctcttccccgcggagcaccacgcggccacccttgtcctccctcacggtgtggcgcaccgtcaccctctttatcctctcgctatcattcttcactgccgccagaatgcggaccttcccgcgggaaggagtcacttccggcgtctgcacccagatgccgtgcgcgggaagatgcacgggagaacacacgtgcagatgcacgttccggtacaggccgccggaaaaggtatgctctcccgcccgcggggcgatgcgggggttccagcggttgtccacgcgcacctccacccaattctccccgcgtttcaggaaaggcgtcaaatccgtccggaacgccgtataccccccttcatgccatcctgcggcctttccgttcaccgtcacctccgccacctggaaggctgcgccgcaatccagaaaaaccttctgccccagccattcctccggcaccacgagcttcttgcggtaggagccgcgccccgtgtaaaaggaatcggacatgaaatagggcaggctgaacgtatgtggcaaatgcgccgtctgccagccgcttttaccgggctcgtcttccagccggaactcccagccgcggttccaggccatcctcctgcagggagacgaagctttctccgcggcggaaacgggcgtttccgctccggccatggaaaaacacagggcggcggcgcccagcatacaggcaatcatcttgcgcatgcgtatgctaccattccacggtgctctttctttcaaccaaaaaacatttccgctccctggagcgcccgcagcaacaagccgtgcaccccttccgggctgcacggctggaaaaaagccttcattcaggaaagcggcgctcccgccgatccgttactgggtaataatattcagttcagcaacggtggcgctttgctcgccgcccttcaccggggagcgggcgtccagcttgaaatagcgggcctccacaggtttgccgaagtcgatgcgctgaacagccggatccttccggatgtaatggtaggtgaactggccttttttcacttccttccagttctgcccgtcatcggaaacggagaacgtgtactggctgatgaggcccttgtccttgtccattctgggcgtgtagatgaatccggtgaacttcattctggttcccatgtccacggcaatggagtgggggaagcccggcaggccgttcgtataggacgtatgccagcaggtatccgggttcccgtcaatggcaaagtgggcgaagccggtatccggctcttccgaggaagcgctcaggatcttccattcgccctgccccttgataagggggaatttccgctcgccgggagacgtgggaggcactttgccggatttcccggcggcagcccaggccctcacttccccttcgggaagcttgaagggtttccggtacgttttttccggccccttgttgacggaatacttcatctccgttccgggcgtggaggaaaccaagctgaccatgccgtccccgtcccgttcaatcacgggggaatggggcacgcccagtcccgcgcgccccaggttcagcagggcggacgtgggggccagcacaaagcccaggggggtggcttcgctcagcgtctggtacttcgccagggggcgcggcccgcaggaggaaccgcccagccccatctggaaggcgtccagattcacgatcaccttgtccttctccggcagcctgtccaggcttttggcgttgttgagctccttcggcgtataacgcaggatggacacttccagcggggccctgggagaagcggagcctacccacagcgccggagccgccttgggtctggacagggccacccagtccgtctccatgcggttgcccatgtcctgggggcgggaataggcgaaaaacatgtcgtccacggaagtgcggaacacgtccttccagcagctcgtgcggcggtcccggtaattgtcccacggccccagccccaggtattccacctggtcataggcggcaggcatcccgaaggtgacgcccagccgcaggagctcttcccccttggcggagggatacattctgacggaggcattgatgacgccgttgccgaacaccgtccaggcaacctccccggagaaggaaaggccggagcctttcgtccggaattgcgccgtaatgcgggccacgccgggagaaatgacggcggccttcacatcggaatactccgccttcatggtctgcatcttcatcttcccctcaaccttgctcctgatccaggcgtcgttgtccaccggggaacggtacgcctggagcgccaccggatagccgggcagaatcaggtcctggctgccgtaccggagggcggaaagcatgccgtccttgaaggaggcggaaaagcccttcccctgcaccaccacgggatcgccctggcgcacggagacggcgggcagcgccgccggagccttcacggaagcctccttctccacggccgccgggaaccactcgtaagcttcgcactcgtccgccacatgctccagttgtttggcggaaagctccttcacgtcttccggcagcttgaaccgggcgtccgccagaaccatcagggagcccgtctgcatggcggcggaaggcagtttcaccgtcacggacttgccgggggccgtctccggcagagccatgcgctccacggcatgcttgccgccgggcgcgagggacaccaggtaaagcgtatagcccttcaacggcttgtggaaatacttgttgcgaacggtcagggaaccgtccttgcggtcaaaggccatgtactggtacaccttctttacttccttcgtcttggccgtggtgttccggttgcccagaatgatgccgttgtcgcagaaattggcctggttgggcctgtccccgaacatgccgccgtaggcctgcgtcacgcccttgaagggagcgggcttgtaaatgccgttcccggcagggttggcgcggagggactggtccacaaaatcccagatggccccgcccaccatgcgaggggaggactcaaaggcttccatgtactccttgaaattgcccagggcattccccatggaatgggcgtattcgcacacgaagaaggggcgggaagtcttctgcttcccccagttttccacccggtccacgggcggatacatggcggaatccatgtccacggccttatggccgtgcgggaattcgcagtaatggagggggcgcgtatcgtcataggccctgatggcttccgaggccgcttcaaaattcggcccgttgccggactcgttgcccagggaccagaacacgatggagggatggttcttggaacggtgcaccatgctcatgttgcgttccacatgcgccttcttccatgaaggcttccgggaaatatccatgccgctgttgcggatgccgtgggcctcgcagttggcttcatccatcacgtacaggccgtagcggtcgcacagttcgtagaaatagggatggttgggatagtgggagcagcggacggtgttgatgttgtgcgccttgatgatctgcacgtccttttccatcacctcccgcggaatggcgcgcccgtagtccggatgcgcttcatgacggttgacgcccttgaacttgacggcctttccgttgaccagcaccgcgccgttatcggcgatttccacggaacggaagccgatattgacggaccgggggtccttcccgttcagggaataggtcaccttgtacaggttgggcgtttccgccgtccacggcttcacgccgggaaacttcctgtccagagccacctgaacctcgcctccggcgggaatggcgggaacttccagcgtgccggaatccagcctgcccctgttgtccgtctgcacgcggccggagccgctcgcgccctcccaatttaaattggtggaaatcccttcaatggaataatccagcttcattccggcgggaatatccttcttgccggaattgcggatggtgaacgttccgtccagcaccccggtcgtgtaatccttcctgtccagccccgccttcaggaacaggtcgcgcacgtgcacctgcggctgggcgaacagggtcacgtcccggaaaatgccggaaaggcgcaggaaatcctggtcctccagataggagccgtcgctccagcggtacacctccacggcaatcgtgttcctgcccggcttcacatagggagtcaggtcgaactcgccgcccgtataggaatcctcggaatagccgactttccggccgttcacccacacgtaaaaggcggactccaccccgtcaaaccggatcattacctgctcccccttccaggaggcggggagattgaaatcccgtcggtaggagcccacggaattgcgctccttgtatgccggccagttcctgggcggctctcccatcaccttggggggattcggcttgaagggatacgggacgttcgtgtaaatggccgttccatagcccgcaagctgccagttggaaggcaccttgaccgtatcccatccggaaacggaataggaaggcttgaagaaatcggcaggcctcccgtccggcgtcatggaaaacttgaatttccaatcgccgttcaggctcagcgtcttgtctcccgccgggagaacggaggcgcggggagcctccttgttgattcccgtcacctcttcattctcccagtccggggcttcccccagcaggggcagcgccggagccaggcacatcatggaaaacaaaaatgctcgtaccgtcttcatctcgggtcaggtgctggattgcttacttgtacttgttgatggaagggtcctgatagcgctcggaatccttctttccttcctccccggaaggcttcaaggtccatttgcaggaatccgtgtacgttttcccgcccacggaggccgtggccgtgatggtgttgacaccgggcttgagagtcacttcaggccagacggcgcgcttcaattcatccggcttgacgcttcccacggccttcccgttgacggccagcttcaccgcaggggcattgctgtaaaccttcacgggcaccgtcttttccgtgcgctccgcaaacctgcgggacgtaatgtacacggtcggctggggactccagttggccttgtagaagaaataggcgtccttgggcgtcttgcggtcataggtcaccagccccttgtcattgatgccggggctttccccctcaaagcgggaggcggaaccgaagtcaaacatgttccagacaaaggagccccacacctccggcctctccctgatgcacttgtaattgatctcatgcgcctgggactgccattcctccggatgccagaaccccgtgggggacggccttttggccggattctcatgcatgcccgtgctggcgccatggccgtattcgctgacggcgattcccattttgccgccgtaatcgcggatgtagccgttcaggttccccttcatggtttccgggccgcccccgtaccagccgggatacgtattgaacgcgatgtggtccggaatattgttcagcttcttgcggcccgcctggttgctggccgccactgtcatgcgggaggggtccgtctccttcacgaacttgttcagttccgtcaattcagcctccatgtccacccctttggaggaagcctccggctggtggccgatttcattgaaaatgccccacatgcaaatggaggggtggttccagtgctggtaaatcatttcccgggcctggaggcggttgttctcccggaactccggcgtatcacgcaccaggttgacgttgggcacctcggaccagacgaccagccccgtcttgtcgcacaggtcgtaaacattactggaggctggatagtggcccgttctcaagccgtccgctcccatgtctgcaatcagccggatgtcccgcgcctcatcttccggagaaagcgcccagcccttccccttcatgtcctggtggcggctgacgcccttgacctgcatgggcttcccgttcaggacaaagcccttcccgggatcgacggaaacggtccggaggcccagaggctgcactatttcgtccgtctggccgtccgccgtcctgatggaagtcttcacctggtagaggtagggattcctgactccgttccagagcacgggcttggcgatcgccagcgttacgggaacctccaggttcttcttttccccggcggcggctttcaccgtctttccggccaccttcctgcccttcatgtccaggatttccacggctacatccacgtcccgcgccttcccgtccgagttcagcagggtcttcacttccacctccgctttggacttatccagggacttcgtcgtaatgaagacgccgggggaggcgtaaaagagggggtcaatgcacacgccgtccgtttcaatcagctcaatgggccggtacaggccgccgaacatggaaaaatccccgcgctggggcgctatatgttcccgctgcgtattgtccaccagaacggaaaccgtgttggcgccttgtttcaggaggggagtgatttcataacagaaagcggtaaacgccccctcatgcctgccggcaggcttcccgttgacggaaacctcggaaacgatgctggcgcctccgccgcggatgaaatacctcttgcccggcctgggggccaccggaagagtgcgggaataaacggcggagccgcgccggtaggcgtcgctgttgacggacttggcgtctccgcgctgccccttcacgccgtccgcggcatcctccgcattccaggtatggggaaccgccaccttcccggaagagcctccgttgaagctgtaatcccaggagccgttcagggaatggacctcacgggcatcagccgccagaaaggagcccagggcgcagcacagcccggcacacgatacgttgaaagagtgaattctgatgttcatggtacagcggaataatttatctcatacgttcaggcatgtaaaatactttcatcctgcgggggagttctccccttcttctaacaagaatttattggcgtcaaatggatagtgttcaatttaacattcatgaacataaccatgctttctaacattttcggttcctgcactaccagaaactttgattttccgatcggatcaaagaaaacataagtaacaacatatcctttacggttacgcgttttccgatggaaagcataagttttctttactataaggatggcctttttcattaaaaccgtgtttgtacaaacacgaggaatgagtatgagaaaagcaccgaatacaaataagttgaaatacgttggagccgcgcttctggaaggggaatcagtcaccctgatccaggctgcaaggctggtattggaaatcaaggaggccctgggagatgaaatctgcaccatcacccggtgcagggaagtcgtctccctgggactgaacgccatcaagaacaaacaccataccgtcagcttcggtacggcggccgtggaatgcctgcgttccaaaagccatcgccgtccccggacgctgacggacatcaggagcatcatccacaagctcaagaagagcaacccggaactggagcacacgcccctccggaacctgagcgtggaggaatgccagagcatcctgatgaacaccttcaccacgtcccgtcagaggcacaaggcgaggctcatcctgagcggcatcttctccttctccgtcaagcgcggatggtgtgatgaaaaccccatcctccgcgtggatacgcccttcctgcgggagcaggaaattcccgccctgacgctgaaagaagtgacccagcttctcaaggcgtgcatggatgaatttgacggaagctgcgtggctggagcggccctgatgatctttgcgggcatccgtccgcaggaagtggaacgcctgctctgggaaaacatcgccatccgcgacggctgcgtgatcctgaactccaagcataccaagaccggaggcgccagacacgtcaccatcctgcccgtgcttgccaaatggctcaaattctgccgtgacaaaagcaagcccggacccggcacgcccatttgcccgaagggctggacgatcaagtggcgcaaaatccgcaaaaaagccggctggggcggaagaaagaaatcatgggtgcctgactgcctgcggcatacctatgccagctatcacgccaagcacttcaaggactacaacctgctgcaaatggaaatgggccaccgctcctcctccctgctccgcacgcggtacctgaacatgaaaggcatttccccgcaaacggccacgcgcttctgggggctgacgccggccaaggtcattgcggagacggaaccgccggaagaaccgccggcggcctgatgggcaaagagaaaaacgctttggaacggaaggcccttttccctgccggggcatggaaaaaaggccgtttcctacagctcgtaataggtatatccgttcaggccggaacggaacacttccagagccctccggcgttctgacggagatattttcccgtcggctacggcctgttccgcaaacgtgcggaacttgttgatcagctccttggggtcatattccacgtaggaaaggacgtcagccaccgtatcgccctccacttcatgggtgtaaacggggcggccgccttccaggtgcacgcccaccacgttcgtatcccccagcaggttgtgcaggtctcccagggtctcctgataggcccccaccaggaacacgcctatgtaataatcgtcctctccgggcttgatggcatggagggggagagcggtagccacgtcctcacggtcgatgaaatggtctatcttcccgtcgcagtcacaggtgatgtccgccagcacggccttgttcgtgggccgttcgttcaaacggtgcagaggcatcacggggaaaagctggcggatggcccaggaatccggcagggactggaacagggagaaattgccgtaataaaagtccaccatggagcaggaaagctcccggaggtcttccggaatggtttccatctccgccagcatgcgggaaatgcggctcaggatgtgccagtaataggcctctcccagcccgcgctggcgcagggtggcgttcccgtaaaaaaactgggcgcgcagctggtcccggtaatagcaggcgtcattgtagcactcctgcatgttcttcctggccagggtccggtccgtatccgcaaaagccttcaacagctccggcgcatcctccggcagctcgggcggcggttcctcgcccggcgcgctcgtcacgtccagcacgttgaacaccagcacggaataataggccactacggcacgcccggactccgtcaccagcgtgggatggggcacctcgtacttggtgcacatatcccccaccacctccaccacgtcacgggcgaactccgcaatggaatagttgcaggaggaatggaaattcgtcttggacccgtcgtaatccacggccaggccgccgcccatgtccagcgtgcccagcggcgcgccctccttcaccaggtccacgtaaatgcgggcggcctccgtcagcccctcgcgcaccacggaaatattcggaatctgggaaccctggtggtaatggagcagcttcaagcaatccagcgcatccacctgcttcagcttatccaccacgtccaccacctgggccgcgttcaggccgaagacggacttgtcccccgcggactcctgccacaggccggaccccttggccgccagcttgatgcgcacgcccagattggggcggatgtccatcctccgggcgcgttccagaatcacgtccagctcggaaggcatttccagcacaatgaaaatattcagccccatcttctgggccgtcagcgccaggtcaatgaattcgtcatccttgtacccgttgcagatcaggtaggcattcggattgtgcatgtgggccatggcggcaatcagctccggcttggaaccggcctccagaccgtaatcatacttggtgccgaactccgcgatctcctccaccacctgccgctgctggttcaccttgatggggtagacaccctggtacttgccctggtaatccgcttccttgatcgccttccggaagctgtcgttcagctccgcaatgcggctgcgcagcaggtcccggaaacggaacagcacgggaacggtggtgccgcgctccttcaggccttccagcaggtcgcacaggctgatatcctttttcccgccgtcctcgtcgttcaggcgtacggtcacttcccctttcttgttgatccggaaataaccgttcccccagtcgtcaatgccgtacaaatctgcggaatcatgatgactccaaccccggactttctgtttgatgccttctttagctgctgccatgtcaatctgtctggtcaaatgttctagcccaggcgggcttcaaaatcttcataagtaaagcggcgcaccgtctccacggagccgtccttcctctggacggcgatgtccgggtggcgcacgccgttgaaaaacgtggtcttcaccatcgtataatgcgccatatcgtcaaacacgagttcgtcgcctgccgccaggggctccgcaaaggaataatcccctatccggtctcccgccagacacgtgggcgcgcccaggcggtacgtatgggagccctccccggcgttccccgccagcgcgtagctctccccggccatctgcacggcgggctgccgcgcggaacggagggaggcgtcccggacaatctggaatacgtccgggcggtagggcatttccagcgtatccggcatgtgggcggacgcggaaacatccagaacggcgtgctccaccccttccgaggaaaaaatatccagcaccctgcacctcagcacgccggtatggatggctgcggcctctcccggctccagccagacctccaccccgtagcgctcgcgaatgcggcggacgagctccgccagcagcttccggtcatagccgggcttggtaatccaatggcccccgcccatgttcagccacgtcatctccgggcgggacaggatgtggccgaagtgccgttccaccgcgcccagcgtagccgccaggtcatccgccccctgttcgcacagggtatggaaatgaaggccggaaatgccggtcaaatccgccccctgcatcacgtccggcgtgacgcccaggcgggagccgggcgcgcaggggtcatacaggggcgtgtggccggtggaaaaccggggattgacgcgcaagccgcacttcagctccccggaaagaaagcggggatgccgcatcacctcctcccggaagcggctccactgcgtcaggctgttaaaatcaaggtggtcggaaatctccgccagctccgctatttcttctggagcatagccgggagaataggtcagcacatgcttcccgaacctgcgccgggccagccgcgcctcccacaggccggacgcgcagcagccgtccagccagggggacagggcatcaaagcagggccagcaggaaaaacctttcagagccagcacgatacggcacccggcggcatccgccacatccctcaggataagggcgttgcgttccagggcagactcgctgatgacgaaggcggacataaagcaacgacaacctaagcgattcagaacgatttgcgagaaaaatttgagtaatctaccatcataccctcaaggcggcacgcatgaaaggcttccgccgcgcctgcgcggttcccctcatcaaacggaaacgtcaaaaaacgccacaaatcggcacttcctgcattcttttccttgaaatgggatgtgttttcctcttttataacgtaaccattgcgattgccatgactaacattcatcccttcaccactgcagcagcctgcatcctgaccgccggagcagcgctcttcaccagctcctgccaacctacctctcccgagagctacgcccgtcaattcgctactgcccagcacgtttccgtacacgggtacaacggccgtgaaacgctgaccaccagggtttacgccgactggggcggcatgccggccaatgcgcgccgcgccatggaggaatacatcaagggagccgaatggaaaacgatggactacatccgtccgcagtacttcatccaggtggaccgctcctactgggcgatctgcattgacaatgacggcaacctggtgggcatcattcccttccgcaatggcagggacgcccgcaagatgtccgtcaacaaccacttcaagatgctggtcaacacgacggaccgcgctcccgccctgggctatgccatcctgaaaaacctggcttatgcggacggcctccgcgtcagcacacgcaaggctgacggcctggaaacgcccgttccggcgccccccgccgtgaaggtggtcgttcctcccaaggaaaccgctccggctgccgcccccgccgccaagcctgccgcagctcctgctgccgaacccggcacgacggaggaaactcctgcggaagacgctaccggaacggaagaaactcccgctgcggataacgcgactgaaggcggcgacgccacggcgacggatgacgccgcttccgacgacttttaagatgcctccccttccggggatgccatcgccttaatttccaccacgctccgccggcacgtacggcggggcgttttttatccccgttcctccggaacaaaagcaagtttgccgttattttcaccttctccccatcctgaaaaaagagaacggaaaaattgcgtttttaagcgggaccgtatttccgggaaggggaaacttcctccgctgaatatcggaaaagctaccgcaggaaaggcagggaggctccctgcccggatgggggcagaatggccgtgccggggaatacgccgttttcccgtgttttcccatggacagcctgcggaggaatggcttgcctgaaaagcccggaggatttcacgggaaccgcatggagcgccgcaagcctttgcggcagatgaaaagaaactgagcgccagcgaacggatattgaaaaaagtccgttaatcaaaacagcgtacgccctccggccgcctgttcatgcggaagccgcagaaattggcggcgcttaccgcaggtcttttcagaacaggaacgcggcgcggagaaaagcgcctgtgaacagcccgtttcatggagaaactgcccttccggcaaaggcggtcacaagctggatgccctgccggaagcagggcattcccattcacccgccttcaccagaggcacatctgccggccctgatggaaaagaaaccggaaactgctgcggaatctcaattcccgcccttcttcacctggtcgggccacggaacggagcttccttccggcgcgcccagctcattacccttcttgtaggtgggcatctgcgccttccgctcgcggagcagcttgcccatcaggccggccatttccttcaacttccgcggctccctggcagccaggttttccttttcaccgatatccttcttcaaattgtacagctcaaagctctggttcccgtgacggtaaatcagcttccagtccccgtggcgcagggcggtggaagcgccgtactgaggagcctgacgattgttttccccccagttgttgggctggtggaacagcaggggacggtccgcagggaaccggcctcccttgagcagcgggaccaggctcaggccgtccagcttctgcggaaccttggcgttccggcatcccgctatatccagaagggtcgggaaaaagtcgtcaatcaccaccggaacagcgcacctggaaccgcccttcgtcacgccgggccaggaaacgatcatgggctcccggatgccgccctccatgcacgatcccttgccgaaggaaaggggataattggcgtcctcattgcccagcctgccggaaatggccaggccgccgttgtccgacatgaacaccagcaccgtgttcttgtccatgtcatgctccttgaggtacttcatgatatcccccaggctcttgtccatcccctcgatcaacccggaataatgcttctccaccggagaccacttgtgcccgtcctccggattcttgtaggaatccgcaaacctcttgtcgtaggcgcgttcatccagcggggagtgcagggcgtactgggccatgtacaggtaaaagggcttgccggcctccttcggattggtcctgatggcttccagcctcttgagggcctcaagagtcagcgcctccgtcaaaaatacgtcgtcctggtaataattattctcatccagcccgcgcacatggttgaacccttttccgtaatgcttggaaccgcggtaatctgccgggtgaccgatttccgtacccgcaatattatagtcaaatcccatattcaacgggttggatcccggcgttccctgggtgccgaaatgggccttcccgcagtgcacggtgacgtagccgcacttcttcagcatctccggcagcgtggccgccgtgacgaaggggcgcgtcatgttgtaatgcatgtcttccccggaaatggggcgtttcgtcgtcccccgggcgggaatcccaaccggctggaggccgttgagggcccagtccggcggctggagatttttgttgttgcggtccgtcgttccgttctgctccctcacccagcaggtcacgcggtgccgcgccggattcatgccggacatcaggctcacgcgggaaggcgtgcagaggggatgggcgtacgcatccgtaaacgtcatgccctgcgcggccagcttctccatgttgggcgtgcggtagcgctcgttcaggaacgtcttcttcgggttgccccggtcgtcggaccagaacgggtgggacgtatcctgccagcccatgtcatccaccaggaaaacgatgatattgggcttctttccggaaacggggtgggaagtattgctctgggcggacgccccggcaagcagggaaaacgcgccgcaggcggcggacaggagacaggcggagaacttcatggtcgcaacatatttaatataatcgtcaaaatcctttcaacctaaaaatacgcacaagcaacctctggtctttcctcttttttccggaaaaaggcatcatcctccgggaagcggcggaaacgcttttgcgccaccgggtttaggcttgattggccagcgggcggagtatacattcctccccatcatgtccgagcgcaagaaaccatatccctttgacgtttttgaacccaaatggcagcagatctgggacgaaaggaaaacctttaaagtaagcaatcccggagaagagggctttgacgcgtccaaacccaaatactacgtgctggacatgttcccctaccccagcggcgcgggcctgcacgtgggccatccggaagggtataccgccacggacatcgtagcgcgcttcaagcgcatgaacggcttcaacgtccttcaccccatggggtgggactccttcggccttcccgcggagcaatacgccatcaagaccgggcagcacccctccgtcaccaccttccaaaacattgacaacttccgccgccagctcaagatgctgggcttctcctatgactgggaccgggaaatagccacgacggaccatgaatacgtgcgctggacccagtggatattcctccagctctacaactcctactacaacagggaactgaaaaaggcgcgccccgtctccgaactggaggaacaggggctgagccgcgaggaaatcgaccagcgccgcctggcctacgtggcggaagcggccgtcaactggtccccggacctgggcaccgtcctggccaacgaggaagtggaggaatggaaatccaagggccaccgggtggaacgccgccccctgcgccagtggatgctgcgcatcacggactacgcggagcgcctcattgacgaactggagccgctggactggccggaatccatcaaactgctccagcgcaactggataggcaaatctgaaggggcggaagtggacttcaccctgaacggggaaaccatcaccgtttacaccaccaggccggacaccctctttggagccacctacatggtcctctccccggaacacccgctggtggacaccatcaccacgccggaacagaaagacgccgtggaacagtaccgcgcccagtgcgcctccaagagcgacctggaacgcacggacctctccaaggaaaaaacgggcgtcttcaccggagcctatgccgtcaaccccgccaacggggaacaggtccccgtctggattgcggactatgtgctgatgggttacggcacgggagccatcatggccgttccggcccatgacgaacgcgacttcgccttcgcccaggtattcggcctccccattctccaggtggtccagccgcccagtgaagacattgactggcgcggcttctgcggttatgaaggcgccagcgtgaactccggcttcctgacggggctgcccactccggaagccaaggaaaaaatgatcctctggctggaggaaaacggcaagggccgccgcaaggtaaactacaagctccgtgactggctcttctcccgccagcgctactggggggaacccttccccatcgtctgggaagacggccgccaccgcgccctgccggaaagcgaactccccgtgctccagcccgatctggacgacttcgcccccacgggcgacccccgcggcccgctggtcagggccacggaatggattgcgtacactcccacggcccaccgtgaaacgaacaccatgccccagtgggccggctcctgctggtactacctgcgctacctggatccggaaaacacggaacgcttcgtcagccgtgaggcggaacaatactggatgggctccaccggcaaccccggaggcgtggacctgtacgtgggcggcacggaacacgccgtgctccacctgctctatgcccgcttctggcacaaggttctctttgacctgggctacctcaccaccagcgagcccttccagaagctcgtcaaccagggcctcatcctgggggaagacggccagaaaatgtccaagtcccgcggcaacgtcgtcaatccggacgacatcgtccgcgaatacggagcggactccctgcgcctgtatgaaatgttcatggggcccctcaaggacgtgaagccctgggccaccaagggggtggaaggcatctcccgcttcctggcccgcgtctggcgcgtggccttccgggaaaaccaggaaggcgaatgggaaatcaaccccaagctggcggcggacgctccagaagccgccgtgctccccgtgcgcaaggaactgcacaaaaccatcaggaaagtgacggaagacatcaatgacatgtccttcaacaccgccatcgccaaaatgatggaatgcaccaacgccatgacctccgcggaggtggtggacgtacaggactatgacgccttcctgacgctgctgaacccctttgccccccatctcacggaagaaattcacagccgcctgcaagcgaaattccccgccctggcggaaacgcagctctgccagaaaaactggcctgtctgggaggaagccctgctggtggaaaacaccgttcccatggtcatccaggtgaacggcaggctgcgggacaagctggaagtgcccagggacatctcccgggaagaactggaaaagctggccctggcctccgccaaggtaaaaatcttcctggacggcgtcaccgtgcgcaaggtaattgtcgtgcccggccgcctggtcaacatcgtagccaactgacaccccggaaagactctgccatcatgaccatgatcgccccgtccctgctggccgccgacttctcccgcatcggggaggaagcgcgccgtgcctttgactccggagccgactggctgcacctggacatcatggacggccactttgtggacaacatctccttcggcccggaaatctgcgccgccgtcagaaaagcggtggggccggaccgtttcctggatgcccacctgatgattgaacggccggaccactactttgaccgctttgtcaaagcgggcgtcaacctcatctgcttccatgtagagctgggggacccccactacatccgcgacaccctcaggcgcatccggaaagccggagtgaaaaacggtctggccgtcaacccggccacgccctttgacgccgtagttccctacctggaggaaatagacctgctgctggtcatgtccgtggtgccgggcttcggcggacaatccttcatgccctccgtgctggacaaggtggaaaaagccgccgaatggcgcacggagcaccaggcccctttcctgattcaaatggacggaggaatcggcaaagacaatgccgcgcagtgcgccctggccggggcggacgtgctggtggcgggctcctccaccttcaaggctccggacatggcccgcgccattgcggaaatgaagtaacctgcgaacggtccttacccagcccgttattccggaaaatcaaaaaatccggcattcccgggaggagtgccggactctttcattaatggctccgttaatcagaacctgcggcggcgcatcagcagggcggccagccccagcaggccgagggaggcggaagccggttccggcacggcggccagcgtcacttccgccctcaacgccggtccccatacggaaccctccgtactggtaaagcccgcattcttatacacatccccgatgtccacgccgtcggcttccttgccaagcctcaacctggcggaggaaaagctcacgtcatcccaactcgtggcatctgaaatctgcgtcgtcgtaaaagccacgtaataagttacgccgctatcaagctgcaaattattgaacacggccttctcccaggaggccgctccgtctccggcgccatctccggccatgtcaatggtggtcgtggactgccccacgaacgtcgttccgtccttggtggcggcggaggaaaaaatcgtcacgtacagcccgtcggtggcatccgtcctgttcgtcgccttggcaatatccagtgattgcaggaacaccgtggaattcggtgaaatcccttccccggaggaaagaagcatgtggtccaggtcaaaggaaaaaccgtaataggctccgtatcccccggaagtcagggtggaaggatcgtctttggtcgtcgtgctcaacacagtagccgcctgtgccgttgccaggctggccagaacaccaagaatacataggcacttcataaatttattcttattaatgggtgaaatacggaatggaacccgttgcccaaggaaatagcggattatgaatccgttaaagattctacaatccggaaaagctgtccttctccacaccccggcttggctggaaaaaactccaaatggacattccatcaacatttcccacattcactttttacggccgcatatcgtctggtagtccaggacctcccggctctgatggatgtcctcaccggaatgcagtgacggctattaaaaaaaacttccgctatgctccagaaagagtttcaacaacgaaaagcaggaactctgccgctttcaggcgccagtgccgcaaagccacactccatcaacacttccaccgtcccctttcacagccgcatatctcccgggagccagggcctcccgccctgatggaggccgccgctgaagcgtaaagacggttattaaccattactggaacgaaaagaaagcccattacatcaggaataccctctgacaattcccatgatatggacaagctcaaattccccaaaacctttttctttcaattttgtaagcttgactccggattcataatccggagacatcatggccgcaccccttcccggaccgcagctactccgcagagacgcccatcatatctccctgacgggcaaacaactccatgccttccgccgtcttttccagcaggtcgggagccaggcgtattctgcccggttcaaaaaagcacatcaccgtggagcctccaaaggcaaaataccccttctccccccctcttgcggcgggaacgtccggaacatacgtctcctcaatcagccccaccccggtggcgcccacctccagcatggcgacctctccccacaactccgaccggatcagggtcaaattccttttattagtccatagccacgccagccggcggcgcaggcagtacggagacacgctcgccagcggaccgcccagcctcgtccacgggccgggcaccccggacaccggaaaatgaaaacggtggtaatccgtggggcacaggcgcgacaaaacgacggcgccttccgcataccgtccggccagcgcttcactccccataagggcgggcaggtcaaaactctgccccttcacgaaaacgctcttgattcggtcagcgcgttcccagcccatgtgccgggcatccgcgggaaaaacggccgtatcctccccaccggccagagggcgagctcccggtttcaggcggcggtagaaaaaatcgttgaaatgcttgaactctcccatccccttgagggaatcctccatattgatgccgtactcctccacaaaggagtggatggaacgcgcgctggaaggacggttcttcagccaccccagcagacgggaaaaaacgccgcgcttgatcaggacatgcagtgcagcccggcctgtggaagtgccgtaaatccattgcaggtacttctctcccagcacctgttcccgttcttccctgcccgtgtagcggttgtaatagcgtatgccctccatgaaacgcctagagtgtcgcccgcttccccatttgtccagccgaaagaggctcgccgcctcctatttcccctgtgcgcgctccggatcctcctccgtaccggaatcctttccttccgccgcgcggtcataccattcccgtgcaagattcaaatcctgcggaactccattgccgtgttcataacaggcggccagcaggtactgggcgtccctctcgtccgcctccgcagccttacgcagccagtacatgaacaaatcctcattcttctccaccaggccgccttcccggtactccagggccaggtcaaacatggcctccggcttgccctgctccgctgcaagctgcagccagtggagggcctgcgtatcgctcttctccgcgcccaggccttcatgaaaacaatcatacaggtcaaaggcggcatccgcatctcccgcatccgccttctgcttcaacccgggcaacgccctgtgaaaccactcctccgcccggtccgggtccttctccacgccgtccccctcctggtaaatgcgccccagacggaactgggcggagggattcccggcttccgcctgccggacgatcttacgtttccactcctccagaaacttcttcatcctgccgcttctccatttcagcgccaccagaaaaacgaccgctaccagcaccatcagcaaaataggcgtccattccaaaaaatcattcaaccagtctatatgcatcttatctttatattggattgctccggcttcatccatcacaaactgtgaacgcggaaaaaaatcccatgccgcaggaaatacaccgcttgcctgcttcccttttccggacaggctgtccggaaaccataataaaccatccggaaagttgttcatccggcgtcctccccaacataaaaaccctcctcaaaagaatattcaataaataaccatttaaaaccatttatcaaaataatcacctcccttaccatgcagacatcattaaaaacaactgcactattcattctacgcaccccgtgagggtgcgactgacatggacaagccgctttgtcttggctcccgggtttcaatccacgcacccgtgagggtgcgaccaacggacggaagggaggccggaaaccaagctcggtttcaatccacgcacccgtgagggtgcgacaatccgctcctatgctaaattggccttgttcccgtttcaatccacgcacccgtgagggtgcgaccaaacttccatattctttgccttacataaagttagtttcaatccacgcacccgtgagggtgcgacggcctggaggatacgggttgagcatcaagggcgcagcaaggggtttgcgccaacctgatgcggaagccggatacggtcaggcccgataagaggtgattcttttgtcaatatccatttcccaatcacttgcagcaagcgccggtctcccgggaattttctgtgagcttggggttggcgcaaggcggcatcagacgcggcgttattccgtaatattccatcttcgccgcgtccggtccggcttgcattcaacttggttcattgatgctagccgttcccctctgccgcgtccagcaacatcttccacgttccttcaaacagaaccgtgcatccccggagccgccaacatggagacacatacacaacaggcctcccgggcggcgcgccgttttccccattgccggaagccgaattcccctccggtttccgctgccattaaaaaggagccgcccttgcggacggctcccgttaacgaatgaatgacggaatatcccttacagggccgtcggaatttccttgcccagttcggacgccttcttggcggagccgtccccggcaatgcgttccagaatcacgtccttgtagctcatgccgcccaggatgatcggcagcacatgcacgtcgtgaggaaccattacgtccagcacgtacgcctccggggattcaatcatgcgggtgatggccgccggaagttcctctatgcggagcacgcgctcgcacttgacgccgaatccggcgcagatgagcgggtagttcgggtagatgacgtcttccgtcttgtgggtggggtcatagctgtcgtgcgggtccgccaggaaggtctgggcccggttggagtcatacttcaggtcttcccactgcaccaccatgcccaggtgctggttgttcaggatgatgcatttgacaggcaggcgctccacgtgaatggtagccagctcctgaatgttcatgagcatggagccgtctccgtcaatgttcaccaccagcttgtccggacaggccaggcacacgcccatggcggcgggaaggccgtagcccatggttcccaggccgccggaggtagccagacgacggggcttgtcgaatttgaagaactgggcggcaaacatctggtgctggcccacgcccgtgcagatgatgggatccttgtccgccgtctggcggtagagttcctcaatgacggcctgcggggagatatagcccttgcggtcttcataggagaaggggtattgcttcttccaatcttcaatcactccgaaccattccggagtgcgggtaaagccggaggatttgcgttcccagccttgagcggccagagcggcgttgagaacctggagggcgtccttcacgttcgcgcggatggggtgcgccaccttcttgttcttgttgatctcgctggcgtcaatgtcaatgtggacgatggtggagtccgggcagaacatgttgacggcgccggtcacgcggtcgtcaaaccgggcgcccagggcgatcaccaggtccgcttcattcacggcgttgttcgcaaacacggctccgtgcatgcccagccagcgcagggaaagagggtgggtctccggcatggctcctatgcccatcagggtggtcgccacgggaatctgggagcgttccgcaaattccagcaggtccgcggaggcttccgcggagatgatgccgccgccggcgtaaatgacgggacggctggcgccttcaatcagcggaatgagttcttccagcttttccgtgggaacgggcagcacagggttgtagccggggagatccatctccatgtcgaagtccggcgcaaacacggcttcctgcacgtccttgggcatgtcaatcaccaccgggccgggacggcccgtggaggcgatgtaaaaggcttccttgatgatgcggggcagttcttccggttccgtcaccagatagctgtgtttcacgatgggggcggtcatgccgaacacgtccgtctcctggaaggcgccgcggccgatcagggaacgcatgacctgcgccgtaatcgccaccagcggagtggagtccagataggcgtccgcaatggaggtgatcatgttggtggcgccggggccggaagtggagatgcagacgcccaccttgcccgtgacgcggccgtagccttccgcgccgaacgcgccgccctgttcgtggcggggcaggatggtccggattttgggctgatggctcagggcctggtgaatcggcatgctggcgccgccgggataggcaaagacgacgtctacaccttcacgcacgaggcattccacgagcacttcggctcctgtcatgcgggttttcgtcggggcggatgatgttttgtcgtttgtgctcatgtgcaaataatattttatttgttcaataggaaaaaaggttctagcgcattccgggcgtaatgtgaagccttttcattaaaatgcaggcgtgcatcccgggaggaggggaaggccggaaagcgcccctctgcggaagccgctggagagggaatcaggccagggacgcgcggcggacgtgcacgcagtccattccggcggctgcggcggccttcatgccgggttccgcgtcttcaaaaaccacgcagcggtccggggatgcccccagaagttccgccgctttcaggaacatgtccggcgcaggcttgccatgctccacttcatccggcgtcagaatcacgtcaaaaagacctgaaagtccggcggcggccagcgtccgggacgctcccggcatggcgcttcccgtagcgatcgccttgggggcgtctcccagggaatgcacgaattccaccacctcccggatgggctgcatgccctcctcttccagcatttccagataaatgcggcgcttgtccgcagcggtagaagcagcatccatgtgcatgccgtaccgttcgttcagaaaacgcaccacgtcgttggcggatttaccgccgcaggaataaaattcatccgccaggaacacgcggtccggcgcccccgcacgggccagggccttgcgccatgccttgtaatggagcggcatgctgtccaccagggtgccgtccagatcaaaaatatatccttcatattttttttcaggcaaatccacgcgtttcttcataacgggggcacaggatgccacaaaccctttttccggtaaagcccgcagtctgcccgcgcttaggaggaatgccttaaaaaatatatcaagagcttgacattttgtcctgttattctaatgtttctgccacctcgaaacggaaaccgaacctcttttaaaacatggccaataccaaatccgcactcaagcgcatccgtcagacagaaacccgcaccgcccgcaaccgcgctgtgtcctccaagctgaagaccctccgcaagaagattgccactgcggtggaaacgtctgacaaggaagccgctgccgttgcctataacactttctcctccgccgttgacaaggccgccaaggtgggcaccattcccgccaaccgcgccgccaactacaagagcaaggccgccaaggccatcgcaaaaatcgcctgagttttcacttcggttttctgacgatctttatggcaagccgctctgttctgctgagcggcttgttttattttcccctcccatgcagcaatcccgcctggataaagccaaactgattattgaccgtcccggggacttcaaggtttgcgaagcctgcggctccatcgtgtccctgaccactgccgtgtgtcccaactgcaacgcctaccgtttcgactccaatacggagtacgtcgtggaacaggccgtactgcttgcctcccgggaacagcgttccgtcaccccggaagacctggaaaattaaggagtcctgcccggcgccgttttccgccgtattcctgtttctctgttttcctctcccgcgggttcggccaccgctccgttttcgtgagaaaaacggcagatgccttcccggtggaaggcgtgcccatttctccgcatccctccagctccggatgcgcgccgctacttgcgcaattctgcaatgcgcaggatagtggcctcaatcaggttggccgggcatgaagcgcccgccgtaatccccaccttcagggatttgcccagattctgcaccaccggttccgtggtcatgcggcggacttcccgcgtttccgtgtcaaaggcatccacgtactggatggatttgatgctttctgcggattcaatgaaatacgtgggcacatgctccttggcgatatccaccaggtgcgtggtgttggaactattgtagccgcccaccacgaacatgacgtccagagggttcttcaacagctcgtacagggcgtcctggcggtcctgggtagcgccgcaaatagtgtcgaacacataaaaattatcatcgtccccgtccctctggacgacggcgtccttcaccatcctctggagcgtctgcgtctccgtcttcagcatggtggtctggttggcgatgcccacttcctccagatcccggtccggatcgaatcccggggaataacagccttcaaaccgtttcaggaacgcctcgcgatctccgcggcccagcatgtagtcgcacaggatgcgggcgtcctccagatcgtaaaccaccaggtatttcccctttccccgttcccccagggcccgggaggccgtggcgctggtttcctcatgggtggccttgccgtgaatgatggaggtaatccccatggcggcgtaattcttcacccttttccagaccttcatcacgtccccgcaggtcgtgtccacaatctgcacgcccttttcctccagcgcatccatgaagggagtgggcacgccgaacgcgggaataatcaccacgtcgtccgcggcaatccggtcataggaggaatcaagctgcttccagggaagcttctgaatgcccatttcctccagctgccggtttacctccggattgtggatgatgtccccgatcaggaaaatccgccggtccgggaacaccctgcgggccgcatacgctatgtctatggcgcggcgcacgccgttgcagaatccaaactccctcgccaggaaaaattccgtgtggcccaggttgtacacgttgcccgcagaccggatatgggaaatcaattcactctggtaatgctgctggatttccttctccacctgttccatcacctcggctcgtctcacattcactctggctttgcgggttgagtcctgattcatgctcacagcttccacactttccttctttcgtcaagacaatcacagcttgccaaccggggcttttcacggtatgcacaggcgcatgctcctggccctggcccccatgaaagatgtgacggatctggctttcctcaagacgttgaaggacttgaattcactgccggattatttcatcacggagtatttcagaacggtggcccatcataaaaagatgtcgccatacatcctgcgctccattgatgaaaatcccacggggcgccccatttacggccagctcgtgggccatgagccggagtatctggcgagggacgcgctggccctgatggagcacgactgcgcgggggtggacctgaacatgggctgccccgccccgatggtgtgcaggagaaacgccggagggggcatgctgcgctccctgaaggccatggacgcggccctgggcgcgctccgggacgttcttcccgccggggccttcaccgtcaaatgccgcctgggatacgagaatccggacgagtttgaacgcattctccccgtgattgccgcccacaccccggacagggtgtgcatccacgcccgcaccgtacgggaaggctaccgctccccggtgcatccggaatgggtaaaatgggccgtggaagcgctggactgtccggtggtcgccaacggcaacattgtagatgcggccacggcggacgcgtgggtgcggctggcccggcccgcaggcctgatgatcgggcgcgcggccctgcgcaatccatggatattttcccagctttacgaccgtttccagggtagagtccctgcttcccccaccttccgggacgtgctgcattacatccgccgcctccatgagcgcacgctggaaatgcaggagcgttatgtggaggaaaaacacatccaccgcatgaaaaaatacctggtttacaccgcgcgcgggcttccggattcctttgaccattacatgaaaagggcgaaaacctcccgcgatttcatgcgcatttgcgaggatatcctggacaatgacgccccgtttgcccccacgccgccggaagacacgcacctgttcgcccatttccatgccctacttgcgcaagaggaagcttgtctccctcccggaattcaggtatgaattcccgtgttcatgaatccgctgccttccgcccttctcctgggcctgaccgccgctctctgcgccgcccatgacgccattccggacggagtggaattcctgcgcgcctacatgcccgcgcaggacagggaaacgattacggaagaacggctggaccgggaagtccgcctggcgctggacgcccgcagccagttcccctgggccggcaaggttccgtgggagctttatgaaaacaacgtgctcccctatgccgtggtcaacgagccgcgcgacgaatggcgggaacagttccacaacctctttgcgccgctggtttccgcatgcaagacgggccgggaagccgccctcacgattgcctcctgcatccagaaaaccctgaatgtgcgctattccacggaaagaaggattccccaccagggggtgaaggaatccctgcaatccggcaaggtttcctgcacgggccagagcatcctgctcgtctgcgcgctccgctccgtgggcattccggcccgcatggccggcgtccttacctggaaccatgtgcgcggcaaccacaactgggtggaagcctggtgtgacggggaatggaaaatgctggagtacaacgagaaggatttcaacaccccgtgggtgatgtccgccatcagcatgctggacccccgcaagccggagaacgccatttacgccacctcctggaagaaggagggcgccggagagttcttcccgctgatctgggaagcccgctacgacgaaaaacggcgcgcgctgaccttccctccggaaagccggaccgtccccgccgtcaggatcacggaccgttatatgaaactggcgtcggactgggtggcggcacagccggagtacctgccgggcagcaggctgatgctggatatcagggatgggaaggaaggcagcggcagaagactgcccctgcgcgtcgttctcaagtcggaagaagggaaagtcctggcggaaggcaccacccccggcccatccgacgacatgaggaagtttctggaagtgcgcctgccggacaccgtctcccgcggcattctggaattcatgctgcccgacggaacagtgcgccatgaacccgtggcccatacggaagccccggtgcagattttgaatttctccgtgaccgctccatgaggattcccctgtttttcaataatacggcgcgcagcgccaggaccgaccgcttccgccgctggctggacggccaccgggatctttttgacgtcgttgagccggaaagcagggaagacatgctgcgccacctggccgcccgggcggattccggaactcccgtcgtggccgtggcgggcggggacggcacgctgggcgtggcggccagggccctctgcaatacggaaacggcactggcccccttccccgcgggaaccatgaacgtcttctcccgtgaaataggtatccggcaggattttgaccacgccctgcatgttctgaatgcgggacgtcccagggacgtggacctgttcgccttcaacgggcagccctttctccagatggcgggcataggcgcggacgcccgtgccgtggaactgaccacgtgggaaatgaaaaagaaatggaaggccttcgcctacgtcattgccggcgcccgggtttgcacggagcggcagccccggctgaccctgtccacggatgacgggcgggtggtggcaggccgttccatcctcttcggcaacgggcgcaggtacggcggaccgctgaatttctttgcggaagcggataatgacgacggtcttctggacgccgtggttttcaaacattccattccctccatcatcggggaatgcctgatggccgccgtccacggaggcttccattcccggcggaacggctcctttgaatatatccggatgacggggggaaccgtcatttccgccggacaggccgcctgtgaactggacggcgattatatgggcaacgccccggtccgcatcacgcgccacggtacgctgaaggtactcgccccctgaagcggagccgcaaaaggcttccttcaacaggccgcccctgcgcgccttaactgagcagaaaacgggtaaacgtatccagcatgcaggaaagatggacggtgtggacctccggaagcccggtgaaggccagtacaatggcggcatccatcagggccgcgacgccaatccatttgaccatcgccggaagcggggaggcggaaggttcgtaaaagctccaatcttccttcacaaaggagaaatcctcccctgaatcaaaacggcggaattgttcctccaattcctcaaccggcatttcatgggggcagacgtagccatgggcgtcatcccccacctcgcaataataaaggccgttacccaccggaacggactgcatgtgcattccgtccccgccaacaagggagatatgggctttatgagaagagttcccgtagcggaggaacaattcatccaagctgccgcacgtttctccgttaaacagataacgaggggaggctgtcattttcttatttataaaaatgaggcaccggaacacaagaatttttgacaggagagatggcgcatccctgtcatacccgcggaaacagcgcaaaaagaccgtaccggcaagcggtacggcctgaaacaaaggggaaattttcccggagggaatgctacatgcccatgatctgatagccgccgtccacgtaaatcacctgtccggtgatcgcggctgcgccgtcgctggccaggaagacgccggtagcgcccagttcctcgcccgtgcaggaacggcccaggggggcatgttcctcatacaccttgaacatggtgttaaagccggaaacgccgcgtgccgcaagcgtctgcatggggcccgcgctgatgcagttgacgcggatgccgcgggcgcggcccagatcatacgccagataacgggtgcaggcttccagggcggccttggaaacgcccatcaggttgtagttcggcaccaccttttcggaacccaggtaggacatcgccagaatgctgccgttgtcggacatcatgggctccacggcgcgggaaagggccaccagggagtaggcggagatatccagggaaatcttgaacgcctcgcgtcccgtatccaggaaactgccgccaagggcttccttcggggcaaaagccacggaatgcagcatgcaatccaccttgtccgtgtgttcccggactttttcaaagaatgcattgatggattcatcattgctgacatccagatcgtaaacggggacgtcttcgccgaagttttcatggaccagcttgagcacgccgtccttgaggcgttcgccctgataattgaagatgagctttgcgcccgcttcatgccatgccttggcaattgcgaacgcgatgctgcgcttgttcgccacgccgattacgacaccaactttgccttcgagtaatttacttgacataatggtaagtgaatactgccctactttccttcatttgacaagaaaaacggacgtcacggcgctccgtcaggctcccgtctgctggcggcaggccttgaccgtgttagccatcagcatggcgatggtcatcggccccacgccgccgggcacgggggtaatggcccggcacttgggcgccacttcatcataggccacgtctccaacaatccggtagccgcgcttggcggaggcatcttccacgcggttgatgcccacgtccaccaccacggcgccgtccttcacaaaatcagccgtcacgaatgcgggcctgcctatcgccgccacgatgatgtctgctgaacggcaaagctccggcaggttcttcgtgcgggagtgggccaccgtaacggtggcgttcgcctgcttggacatcagaagatgggccatcggcttgcccacgatcatgctgcggccgatgaccacggcattcgcgcccgccgtttcaatgccggccgcctgcaacagcctcatgcagcccagcggggtacagggcacaaaaccggtttcatcctccagcaccagcttggcgacgttctccgggtggaagccgtccacatccttggcggggtctatttccaggaccacggccgcctcgtcgatatgggggggaggcgggctctgcaccagaatgccgtggatggaggggtccgcattcaagtcacggacgacctggagcagttcttcctgggaggcatccgcggagagaacgattttacgggagttcattcccagctccgcacattttttcaccttggaattcacatacacctgggaggcggggtcctcccccaccagaaccacggccaggccgggcgttattccctgttccctgagccgggcaatgtcctttccaacctcttccagcacctgggaggctacctgttttccgtcgatgatttgcataataatgattgattaagtggcgggaagtccggaagcccctcgctcagcagcccggccagaaggcgggcgtagtccgctacctgctcatccgttgcgtccggaggaatgaacaggcgctttttccatagaatgttcacgttggaacacggcttgggaatggcgtagcggtcccaggccttgttcagcctccagcagctttcatattcgatgcacacgggaacgatgggaagcccggactgggaggccatcttgatgatgccgtggtgcacctggtaaatggggccctgcggaccgtccggggtgaggcagaagcagacgtccccctcctgcaccttcctcatcatttccatgtaggccagggctccccgccgtccggaggaaccgcggacggaatccaggccgaagtgtttgcatacggcctccaccagggcaccgtccttgctggcgctggtgagcacgcacatcttgagcggcttctgggccagggaccaggcatagccgggcaccgtcgtgcggttgtgccagagggccaccaggaagggcgccgtgtagacgtcgtcgtgctcctccttgatggagcggatattcaggctcatgcagatgggctggagcaaggaccacaggccgaagccggccagcttggtccaccagcgggaacgcttttcggacgtttttcggacaatggggttgagcagcaacatgaattctcggcaatatcacatgaatccgtccaccgtaatgcgggcgggcggggtacttgacggagcgggaagagccgttccgcgggagggggcagtccccattcccggacggtccgcgcgcggctccacttcctggagcatgccggcggagttgtcctgcggggatgccggcgtaccggaaattttcacggggagaatgatttcatgcccctcctgcgtaacgccggacggcaggcgtcggctatccaccatgtaggaggggattttaaagaccagctctcccgtcacggcggaaccgttgctgtacagaaccccggtcactcccaggaagccctgctcaaacagggaaatctctttcagggaggcggaacggtccgttccgtcgctttccagcagaaaggagccggacgtaaagactggggaagagtaaggcagccttatttccgtgttccgggcggtcatggccgccagcaggcgcaggacgggcagcctgagcatggtcgccttgatgacggaaccgctgtacccttttacggagggccttttctgttcgtccatcacgggcagcgcaaagtccagcttcaattcatgcttttcatccacttcctgttcccccatctgtaccttgaggaaggaagcgaagtcatcccccaccagggagaggaggtcaaaattcctgcccgtcagggtccaggcctggtggcggaaatccgtacccaggaggaaattccccgtaatcatgaaggggctgaggtccgtaggcttgttgagcaggcgccccttgtccagaaaaccggagaaggtgagctgcttgacgccgtttccgtttaaaatgatggagccggagtcgacgcccatcagaggccagcccttgattttcagcttttgctgtgacaggtccagcacgtattccggttccgtaccgtttccggacgtgcggatgtaggcttccgccgtcatgtagaaggggccgtcattccgttccagggtaaattcctccgtcttgtgggcgtaacctacctccaggcgcggagaggtgtaccgccggaagacgaacgggagttcccgcttcgtctgcggcacggcaaatttggagaatccggggcgcaggccaatcgtgaccttggccatgttcaggctttcccccttgatttttcccatgaacagggacgtggcggagatttctccggaaacgccttccatcattacaaaagacaggcaggaatcctgcgggaaagtgaccttgatgcgggcggccttcatggaaaggccgtccatcgccatgccggaggcttccaccttcccgccccaggcggcggagaggtccgattgcagccgcccggcgaattcctccgtattgaaggaagtcaggcggtacatgtacgttcccgccagggcgcccacaaccagcaggaccaggatgcagaggccaatgaggaaacgcttgtttttcagcacggcctgcttggcgtccccgtggtcgtcattgtaggtccgccggcgtttttccacacggatgaccttgctgccgtccgggcgcaccactacttccctctttcgctccacgccctgggaatccgaggcatgcagctggcgcatgatattgtccgccccctgggaggaagaagaggactcaggatcggaatcactgttcttcaatagtcttaatccggttaaaggttactgggcattgctgagggcgggaagaggcgcgagccctgccggagcttcctcatccggaacggcggtgcccggcgtgtagagctgcttgccgcccgggtccaccacttccgccttcaccatgatgatgatggccttgcgctcttccttggatcccttggagcggaaaaggcggcccacccagggaatatcccccagaatggggattttatcctcatacgtgatggaggtggattttttcaaggcgccgatgacgagcgtgctgccggtggcaatgcgtaccggagcggtcaggcggcgcgtggagaatacgggctggagaatgaagttgtcggaagctttcaccatgacgatgtcttccttcgcatttttctcctgggaggccacggggacgaagagcggcgtaccgtagttgatgaagccgtcaaagtccacgatttccggcactacggtcatttccacgatggatttgtcatcgctgatgccggttacctccacgttgaataccgtgccgagctgcctggtttcataggcggatgggtgggcgggcgtgatgggcatgaccggcaggcggtctccgccatcgtcgtcatagtcgccccagtcgtctccgttattgttgttgcccgtgctgttgggaacttcgggcggatcgtattccgtggggtaaatcagttccttgccgctgaagaaggtggctttttcccctgggcgcacaatcacggaaggatgctgcatgatgtccgtgcctttcttctggctcaggccgcgcatgatcatcgtgatgtccgcctggctccacatgccgcgcatggtgacgatgctgggcgcaccgccgggaacgtaggccacgccggtgcttctggcggaggaaccgcgctcaatcatgccgtcaatgctgtcttccgtaaaaacctggttgccggacctcagtccacccaccacccctgccgggacggcggctccgaccacgctggcggcgctgtccagcacggtgttgttgtagtcattcttgttggtgcccgcaccgcccatgaaccacttggaggggtccaggttcaggttcacgatccagttgaagcccaattcttccaggtccgtttgattaacttccaggaacgtcgcgctgacaaccacctgcaggggctgttccgccgtcttggacgccaccagctcctccagcatgctcaagtccttgggcgtgccgtggaaaaggagggtggagttgcccgagttgtatttgatgaagctgccttccgggaatttcacgcccagggaggccagggccttctgcgggtccacccgtttcagggtcatgccggaagaaccggcatccccggaaccgaagggatcggcattttccgaatcggaggattccgacaggccggagaagaagcccggaggaagggcaatggccttggtcaccatgtaggaggtgccgtcagaactggataccagctccgcgccaaaggcgttcgtgcgcagaatgaggccggaagcgcgcgccacgtattccagggcgtcgcggagcggcacgttttgaagattaagcgtaattctcttgccggcggtctccttggcggaaacgctgtccgcaggaccggggtccacggaaatattcacgccgcgctccgccgtcgtcatggccgttgtatcatgcgtcctggccaggctgcgcagatagtccacggcttcctgcaccgttgcgccgtccagctgcacgcggggcagacggatcatgcccagcttctggtccacattcaccaccggattgtccagcggctgggagaaggaagcgggttcctccggcgtttccgtcaggggaacgggcatctcccacagcttggagacgtccgccagggcactgctccgggtttcatccctggcagcgtcaaagtaggcggttctggcgcggttgaccagctccatgccgcgccgcgccgccgtgttgtaagggtccgtctggaggacggaggtaaattccttcagggccgcatcatactggcccagttcataatagccgtaagccaggcggagcaggcggttgacttcctccacgttcttgacgtgttccggggatagggccggattcgtgcgaaccgggtcccgggctatttccagcgtgcgcttggccagggcatggcccggcgtagctttcaaggcatcttccagcagcttgacggcctcgtcgtaacgccccaccttgatgtattcctgcgccacggccacgctggcgtccgcaatgctggtttccagaaaacggcgccgcttctccatgttgggggacttgggcagcgcggtcaggctcctgcggtaattgtccagggcttcctggtacttgccctcggaatacagctgacgcgcctgccccagcagcagcatggaagcctgggcctgctcttccatccgggccgcagtccggcgggcggcccctgctccttcctgggccagcccctggccggctccaataccggcaacggcaagcgccagggcaatttgctgaatggcagacatggagtgagggaaacgtctagtcataggaatttccgggactataccgaattaaaaaccgcccgtcattataaaaacgcccagcagagcaaaaaatatcggaaagggcagccgcacccctccggagggaatgcccctttaaacggcagagagttccagcacgcccacatgccccggtttcaggggatggggaagcccgcgttccatcagttccttccggtcaaaaacccggtcttccccctctccggccatcaggttcctgacacgcacgcggtccgtctggatgccgcaccagccgaaggcgtgctggggaatggaaatgcggaggttgtagaagttgatctccggggaaaggttccccaccaccagcacggtggccctggaacgggcatcatgccggagcatggcgtacacccagtggccggaggtgtcttccgcaggttccctgccaaaggtggtgtttttcatgttggcccagttcaggccgtaaaaatccccgcggtcaagcgccggatgctgcatcaggggaagcagccgctgatgaaagttcctcagctccgcggaatcctccggcagcagagaggcgtcaaaccgtccgtccgccacccagggctggagctggggcaggcaggtgtagtcaaaaatgctggtgcggccgtcatggccgccgtagccgccgggactctccccccgctcccctacttcctgcccgttgtacaccagcacgggaccgcggccggacgcgtacaccagcgtcatgatcgccggaaggatgatgcggcccaccccgccccaggagagcggggagcacacgcgcgtttcatcatggttttccacgtagcggacgccgttggccatgtatttggggtcgctccggaaaaggcggtcgaagtcgtttgcccagtttttttccgtgtacacatggagcgccaggcggtagcaggccgaatcgtaaacggcattgaacccggattccagcagcgcggcgcagggatcgccgggggtggttttcatgtggtcattgtacgcttccgccatgaaaaacacgtccggcaggcggacgcgggagcgggagatggcccatttccagaaggccatgggaatcatgtgggccatgtcgcacctgaaaccgccgatgcccaggccctgccagaaggaaaggatgtcgtccatgatgcgccaggtcttgggcacgcgctgcttggggctcgtccagtccggcagcaggcggagggccggcagtccggccaggaagttatagccgtagttgagtttgaccgtttcataccagtcatatctggtggggttccacgtaacggcattgttgcccgtgacgcggccgaaggtcatttccccttcaaacaggccgtccggcagatgcaggggggggccgtcccccgggctgttggaggtcaggtaaaagtacccctgctccggagagaaaaacgtatggtggtcgtccccttctccaaaatcgtcatgcccgtcccagtccgccaggtacgcgcgggaaacatggttggggataaagtcgatcaacggcaccagccccaccgttcggcagcgtttcacgagtgccttgaattcctccattcttttttccggcgtggaggccaggtccgggtccacgtcaaaataatccactaccgcatagggactgccggccaggccttttacgatggattccggctgggcgggcagctcgggataggccgtctgcgtggcgtgcctcagcaccccggtcagccagatgtgggtaaagcccatccgggctatttccctcagggccttgtccgtcacaccgttaaaggtgccgcacccgttcgtctcccgggtcccccagtccaccccatgggtttccatgttggagaaatggcggacaaacagttgataaatgaccgggcgcatgaactgaaaggatgaggtcttgcggcctataatgctaacttttccaggtactctgcaagtgtattctgttccaccggggcaatttgccccagcatcagcagggcctccttcctggtccggagcgttccttccaactggagctcctgcaaacgggacagccatttcctgaaatcgggaccggggggcagccccaggtccagcagatcgcgcccggtcaccaggggcggaggcaccaggggtgcgtcccggtaggaatccatggcgtcccggacaaactgccagttgtccatcaatccgttggaggaaaggcagtccaggcggtgaagctccagctcgtcgctgaaatgcggagcgctcatgaacatccgcagggtggacttcttcatctgctgcacgttcatgaagcgcatgtggcgctccaccatggcgcacaccgcatcaatcacggcattggaatatttcagtctccttaaaatgtcccgcgccatggaggcgccctccttgtcatgaccggaaaaacggatgcgccccgtttcatccacctggcggcagggaggttttccgacatcatgcagcagcacgcccagggccagctccagagacacgggggcgccgtccttccccagcgcgtccagcatcatcagcgtatgggcgtacacgtccccctccgggtgccactggggaggctgcgtgcagccgatcatgccgtatacctccggaataacatgcttcatcagtcccgtttccaccagcatttccacgccccgtttccttcctggagacaatagaatccggtccagttcctcccggatgcgctccggcgcgatgcgggccagcagcggggcgttcctgcaaatggcggcataagtttccgcttccacccgcacttccctggtaacggcgaaacggacggcgcgcatcagccggagggagtcctcctcaaaacggcggtccggctccccgatgcacctcagcacgcggacccggatgtcctccacgccgcccacataatccaccacataacccggaggaacggaaaacggatcttcaaagaggccgttcatggtaaaatcacggcgccgggcgtcctcctccgcatccgtgaagcagacggattccgggcgcctgccgtccctgtagctgccgtccctgcggaacgtagccacttcaaaggagaaaccgccacggcgcaccagcaccacgccgaaggcggcgcccacttcccaggcgtccgggaacaggcgcagcacctcgtccggacgggcggaggtggcaatgtcaatgtccttcacgggatatcccagcagcctgtcccggacgcagcctcccacaaaatacaccgtgtgccccgctccggccagcacgcgcgccacagcctccgcggcctttctcaatggaatattttccatggaacaggctattcgggcatgggccgcagggggggagcggaaagagaagagggctgctccacaccggaggaagcaggcggggccgctggccggagcgcggcaggctgcggaacggagggaatgcgcgtatccggagagttgatcctggccggcagcggagccggcttcacggcggcgggggcggccggggcctttttctcgtccgcctttccattctttttcccttccagcttgcccatgaccgcgtacagattcgcgtcaaacagcatgtccggcgtgccgcgcatcaggattttccccgcagggtccagcagatatacccgaggcgtgagcatcacgcggtaatccttgaacgccgccgccttttcatccaccagggagggagtatccatctccaaattcagcagggcctttttcacgtcctcactgtttccgggggccaccggcatgaccgtcaggcccggaaattccttccgtagggaaacggccttttgcaaaaactggacagagcgcacatcccggggatcccagaaaaccagcagcacgggcttgtccccggaggggaccgtcacttccgcgcccgtggcggtggaaggcaggcttattttgggcccagtctgtccaatgttgagattgcgtatttcatacagctcttccttcaccagattccggaccggaacgggaccgaagctggaatcatagcatttgatgatggcgtctttcagcagctttccgcgtgccgccaccagcctgacgtcatcctggagcattcccgtcgtttccttcatcaccatggccagccccagggcggacagcccctggtcttccggaaactggttgtaatccttgatttgttccagaataacgcggcaacgcaggtcgcgggagttgctcaacgcatacgccgcctttcccgctcccttttcccggaacagggtattttccagggagtccaggcaaagcacgacaattttcctggcaacgtctccgttggggaaagcctgcgccacggcctggggatggtccagaaaccaaatgacagccgggagaaggtagggtttttgagtctcgggcttttgaaggtccctccccacctgcctccacaattcctgcgccaccggaatggcattcggacggctctccatcagttccgctcttttttcatcgctttcagccgttttgaatgcggattcccagtcggactgcctcatttgccagtccgccagcgcattcttcatgccagcctcgtccgccggagcccatccaagcaggctgcatgcaccggctatcacgcaaaacgctctcttcataccctgccactatgccctgatgcgtcccgctcgtcaatcaaaccccgcggcaaaacgcctcctattcttccttccccgcttccttccagccgtttacggcgcggaacgcgccatccggagacgaacaaaccccggcgaatcccttcgccggggctgctgttcaactaactacctatgaagacggttgagtccttaagtggatgaagtgctctctctttcactgcatccggatcataaccgttatgggtgagacagccgggcgggaaatatgttcaaacattccttcttttgtatgacacaaggtccgcccccctcctgcgggggcaaaaaagcggctgcggaattccttccgcagccgctccaactaactacctatgaaatcagggtcgttcctggtgattcggaaggctctcgttccttccttatcgaacacccctgttcattcagcatacttgcatgaaccaaacgctcaagatttttctttccttttcatgcaaaaagcccggttccccgccgccttacgccgccacgaagttccgttcgtcattagtcagggcccgcacctgcacggccatgaacctcatttcattaagcatgttcagataaaggagggaggaacgggtgcgcgtctggttgcgctgggcgcgcttgatctggcgcttggtggcctttgccaccagttgaaggagctgttcctgggccaccatggtatagtcgaactggatgtacgttcccgtctggagcatcttgcagtattcatccagaagcttcatgagagcggtatgcacctccttcaagtcgtccacctggtcaatcgtgaacggcgtgtggttgttgtccacatacgtgaagatggactcggaaaactgcgccaagctctgcgtggcttcgttcaaatgctccagggcctgcacgaagtggtagcccatgtccagggaacgggactgcatcttgtacaggatggggagaatgtcatacttgtggtgctcgctgctggtcagggccaggcgttccgcggcgtccgccagctctttcagggccttccggtccccctggaagaagttttccacggtgtcattgtagatttcccgcagcttgagcgtgctgtccacgacctggtggctgcacacgtccagaatgttttcctccgtaatctggtcaaaacgctctacggaaagcttgttctcccgcttgcggtgcatgatggtggatttcaccaggatgacgaccaccagggccagcagcccgaagatggcgtacacctgcccgtagtgcaggacggtcgccatgacggcggccagcgtgaaggcggccaggccggtcatgaaccagccggagattacggtcagtacgccggtcacgcggtaaaccgcgctttccctgccccacgccttgtccgccagggaggaacccatggctaccatgaacgtcacgtatgtggtggaaagggggagctgcttgcccgtggcccacgcgatcagcagggaagccaccgtcaggttcaccgtggcgcggatcaggtcaaaggccacgcggtctttgggattcagtggctgcggggcagcatcccactggtggttcatgcgcaccagcatgcgggcggggataagctttttcaccccgcgccccagcgcgatggcgctgcgcacgatggcgcgggcggggggaacggagccgaaacgttcaatgcctccttcaccctgccgggaaagctccacgccggtggcgatcaccgtcttcgccttcttggagaaccacagcgcaaaaatcatcatgcatccggcggcaaaaagaatgtaatggttcaccggagcgccctgcccgggcatcaggcattccatggcggtgatggaggaggcggagccgccggcctccactacgcccgtggcgtactggaaggaatccaggccgcccatgaacacgccgatgaagttcacgaggtcgttgcccgcaaaggccagggccagggagaaggtgccggccagcacggtcaggcgcaggatgttcgtcatgaacaggtgctggagcaggaacatgagcacggaaaaaccgccgaaggccaccagcagggccatgcccaggttctggtcaatgtattgaatgaaggaaggctccatcagagtggattccttcaagcccttgaacacggcaaagtaggccaccgccgtcatggcgatgccgcaccagaagcagccgaaccacttgaagcgggactggtatttgaacgtaaacgccaggcgggaaacccacatgacgatggtgcccaccgtgaaggcgatggctacggaaaggagaatgccggtgacgatttcaaacgccttgtccgtattgatgaagtcccacacggactgcgtcatgtgaagcttggaaatcttgaacagggccgtcgccacggcggagcccagaatgccgaacaccagggaaacggtggtggacgtgggaaggccgaaggtattgaaggtatccaggagtatcacctcgctgatcatcacccccaggaagagtagcatcacttcgtggtaactgaacatgttcgggtgaaaaataccgttgcgggccacctccatcatgccgccggagaagcaggcgcccaccagcacgccgatggaagccacggtcaggatcacccgcacgggggcggccttggaaccaatggcggagttgaggaagttgacggcgtcattcgctacgccgttgatcaggtcaaatgccgccagaagcagcagggctacgatgataatccagtaaattgagtccataactgtctcttgtgaatggtgggcggagggcgtccgcgagctgcaccaccgcctctttacacggaaacggacgattttgctactgttttgttacagaaaaatcctttcgccttctcaacgggaacgggggaggaaatccagctcttcaggatcgggccagcggtgccgtggatagcgccccgccaggtcttttttcatctggccgtagccgttccgccagaagctttccagggaacccgtcacctgccaaggcctctggctgggggccaatacctccaccttcacggtcacggagccgttggcaatgcgcggagactccgccacgccgaacagccgctgcaccgtaaggccgatcacaggcgtggaatcctccccgtacctcactttcgcgtgctggccgttggtcagcgtgaggctcaccggagcgtaatcgtccagcgccttcgcctgccagccggagagccagtcccggagcacgggaatgatctcccgctccttgatgtccttgtagcccacggccccctcgcaaaccagggagatggctaccagcttgtcttcctctgaaaaacgggggagttccagttccggcatccagacgcttaaaccgttcaggcggcgtatccactgctccacggcggcgtcccatttcaccagcttcaaggttccgtccaccaccctttccgccagaatgggggcggccagctccggcggagcgtccccgcggtcccggtcttccagcaccaggtcttcatacatcagtctccggtgcaggcgcacgcggcgcagcacggcgtcaaagacggccgcctccccgccggaaaaacgctccggccagacggcgcgcagctcctccgggtcaatgagcgtacagcggcccacacgggtttccaccgcctttccggacaactccgccacctccgccgccacaaaatgctccccgtggaacgccacgctgccttccgccagcctgccccccacgccgccggccatgcggcacgtgttggcggccactccgttccggacgcccacatggtccgcaaagctctccatcatggcgcggaccacggcaggccgcgccgccgtgaaatccggctccggcatttcccgggatttcccccggctgccgatggacaaaagctgccggtacgccatccacacttcccgcgccccgcgggcggaaatgccccagcgggtgcacgcccccgcctcaaacccggcgtccacagccttttccaccgcgcgccactccgcctgaaaatccgtatagtccgcagaatcgcgcaggttgtcgttcaagccgcccttcatcgctacgccctccccctgcatcagggccgcaatggcggcaagctccaccacgcactgttcatcctgcccggccgccatcaggcgcgccagccgcggcggcagaggaaaagcggtcatccttcttcccacgtccgtcaggctcccgtccgcctccgtagctcccagggcggccagcagattcacggcccgctgcatcaccagggggtccggcgcatccagccagcggaacccttccggcgcggttatgccccacgcggccagattcagcacggcccccgccagatccacccggaaacattcgggcggatcaaaatccgccttccgcgcctgctccgcctcactccacaaccggaagcagcggcccggagccacgcgtccggcacggcccgcgcgctgggcggcggacgccttggaaatcttcgtcaggtgcagcgtatccatgcccctgtaggggtcccagccggaccggcgcaccagaccggaatcaatcaccgtgcgcaccccctcaatcgtcagggaggtttccgctacattggtggaaacgatgacgcggggatttttcccctgctccacggcgcgattctgctgttccggggtcaacgctccgtaaagaggaaaaacgtcccggccgcccatccacggcctgcctgccagcaactccgccgttttccggatttcatacacgcccggcatgaataccagcacgtccccgcagccgtcatccttcaccgcctccttcacggcgtccgccgcctgctcccataccggaggaggggataccctgccgcgaccgtcgctgaccagccggggagcccggtaaacggtttctacgggatactgccttccgtgcgcctccagcacccggcaggaggcgcccatgtaatcccgcaggccggatatttccagcgtggcggacattaccgccacggccatgtccgggcgcgggccttcctgcaagtccaatatgcgccccagggacaaatccccggagaggctccgttcgtgaaactcatcaaacaccacggcgctcaccccttccagggcgggccgctccgtcagccagcgttccagcatgccgtccgtcacgtacgcaatgcgggtgcggggggaaatgtgccgttcaaagcgcaccacataccccacttccttccccagctccactccgcgcagccgggccacgtggcgcgccagcaggcgcgcggccatccggcggggctgaacgacgacgatcaggccgcgttcccccagcccggcgtcatccatcatggggggaacgccggtagacttgccggagcccgtgggcgctttcagcaggatgcgcggagagggggcttgcagcgcgtccagcaattctccgcggatttcctcaatgggaagggagggggaatccataccgggttacaggggaatccgttcatgcccgggccgttcaaccgatgcaggccagcaggaaccagaagaacggcacggtaaaggaaggactgtcaatcaaatcaaaaatgccgcctatccccggcagcagggagccggaatccttgatggccaggctgcgcttcaccagggagcccgccaggtccccgtaaacggacagcaggaaaatgaaggagacgcagcccaccagcaccagcatctgggacatggacaggacggagaccctgaacatcgggaaaaccagcccgatggccgccgcattcgtcagcacccaggaaccgaggatgccctcccacgtcttcttggggctgatgtggggaatgagcctgcgtgaaaaaatgcggcctcccagcaggaacccgctgacataggcaaaaatgtccgccatcttcgtcaccagaatgacccatagcacgcacatgacgatggacggataaacataccccaccctcatataggccagatgcagggccagaatggcaaaggcgaacagccagccgggataaatgaaggaaagcagcgtggtcccgacggaacggagcgcccggcttcccaccaccggatacttcatttcacggataaaggaaatcacgaccagaaggaccggggcggcaagcgccaccagaagaggaaggggaatcaggaacggggcattctccgtaggggcgatttcccggaacttggtcacgtagcacgcccaggacagcagcacgggatacgccgcgccgaaaagaaagctcaggttcggctgggaggcttttctggaacgcagcagcatgtgcctccattcccaggaggccaggatgcagaagatgcagaccagcccgtaatacccaagttcacggtcccaccacagggcccccgccagcaaacccagcagaaccacggtgctgaatgaacgctgcagcagaacgcccattttgcttctggaaggcttcttgtcctggttcggtgttctcatcatcacgcgaagtgtacagaaaacctccgtgacctcaatcctgaaatgctcccttccccgcggcgcccatactggaaacatccgctccccgtccggccctcccccgccgctgacaaggaaggaatgccttccccgctccggaagaaatgcggcggcggaaaaagaaaaaggctgccgtcaagcgggcggcgctacggcgcacgggaaaaagcctccggaaaccgtgttctccttcctgtacggccccaatatgacaaatgccggacttccgcacagaatttcaaactttatggtgtatttgtccactaatgaatttgcctctttcttcctctctcccgcgccctgcacccgcaggggattgcaaccccgccggatgccgttctttccggacggacgggggttcttccgccctccggcagtccctttcccctttccggaaacccggcgcgtaaaatagcgtcatgtggacgttttataagatagacaatcacctacaaatcagtaacactcacatcccagcactagctttttttccctgatggagaaaaccgcacccttttccgttatgaacatgcactcattccgttggattcgacttacagcattctcggccctggccgcagccgccatcacctcctgcgcctccgcggccacggacttcaaccaggtgggcaagcaaatgtccctcctgctccagaacttccacttctcccgcaaggaattcagcgacgaactgtccggaaaattcctggaaacctacctgcgcaaggtagatcccaacaagatatttttcacccagcaggatgtggacgccctcaagaagaaatacggcagggaactggacgactacctgatgtccggccagatgatggacgcggcccaggccatgcacgccctgtaccggcagcgcgccatgcagcgcatcgcctatgcgcgggacctgctgaaaaagggcggctttacctttgacaaggaccggtccattgaacgctcccgccgcaagaccgccgcgtggcccaaggatgaggcggaaatgcagcaggtctggaaagacatggtggaggaacagctcctgtctgaaatcctgcgccgtgaaaccgtggcgcgcctggcgaaggaacaaaacaagcccgacccgctggccaatgaaaagcctgcggaggaaaaactgctcatgcgttatgaacgcatccagcgcaacattcaggaaacggacctggaagacgtggcggaaaccctgctcagcgcagtagccatgacctatgacccgcacacggactacatgggcgcccgccaagtggaccgcttcaagatttccatgggcacggagctcaccggcatcggcgccctgctgggcagtgaagacgacggctccaccaaaatcacgggtatcgtcgtgggcggtccggctgacaaatccggagagctcaagctgaacgaccgcatcgtggccattgactccaacaactccggagaaatggtggacatcctgttcctgaagctggacaaggtggtggacatgatccgcggggctgaaaacacccagatgcgcctgaaggtggaaccggcggacgctcccggccaggccaagatcatcacgctgacccgctccaaggtgccgttgaaggacgaactcgccaagggcgaaatcatcgaactcaccggagctccggaagggcagaaccgcatcggcgtgctgagccttccctccttctatgcggacatggaaggcggcgaccgccgctgcgccaaggacgtcaaaaaaatcctggaacggatgaacaaggaaaacgtggacggcctggtcattgacctgcgcagcaacggcggcggctccctggaggaagtgcgcctgatgacgggcttctttaccgggaacggccccgtggtgcagatcaaggacacccggggcaacgtggacatcaaatccgcccacaaccgccagaagcttttcaacggccccattgtggtgctcatcaacaagctcagcgcctccgcctctgaaattctggccgcggccctccaggactacggccgcgccgtgatcgtgggggatgactccaccttcgggaagggttccgtgcagcagccggtggacatcggccagtacctgcccttctttgcagccagggaccgtgccggcctgctgaaagtcaccacccagaaattctaccgcgtggcgggcggctccacccagctcaagggcgtggagagcgacattcagcttcccaccgctacggcggcgtttgaactgggggaagacattctggactacgcgatgccctatgaccagatcacgccctgcaccaattacaaaaaggactcctccatcacggccatgctgcccgcattgaaggaagccagcgcgaagcgcgtggaaaaagaccgcgacctccagattgccagggaagacatcgccatgatgaagcagcgcatcaaggacaacaagctctccctgaacaagaagacgagggaacaggaaaactccacgctggaagagcgccgcaaatccatcaacaaggaacgcaagggccgctttgcggaaatggccaaggaagacgccaccaagtacaagatttaccgcctgacgctggacgacgtcaacgccagggaacttcccctggcggacccggacaaggacaacgaacagttcatgcacctggcggaagaccccacggcggaactggacgactccccggaatatccctccggccttgacccggaactccgcgaaggcatcaacatcgtccaggacatgttgaagctggaatcctccggaaaataacggtcccttccccattccttcccactcgccccggtttcctccaggaaccggggtccttttttccggggcaaaaggcggccgccgctccttccggaacgtgccggaatgaatccgggacttgccagccggggtgaaataaggcagtatccttgcccgtcagcaatgagcaccatcatgaatacgacatataaaattgccatcggcgcggaccacgccggagtcgacctcaaggaaaccgtagtagaactcctcaaggcatggggccatgaagtgaccgacatgggtaccatgaccaagaattcctgcgattattccgactacgccaatgaagttgcaagcagcattgctgacggtaccaacgaccgcggcatcctcatctgccggtccggcatcggcatgagcatcgccgccaaccgctgggtgggcgtgcgcgccgccctctgccgcacggcccccgccgcggccctttcccgccagcacaacgattccaacctgctgtgcctagcctccgcctatgtggacaatgaaagcgtggaagacgtgctggacgcatggctgcacgcggactttgaaggcggccgccatgaacgccgcgtcgtcaaatcctccggcagccccctgcaatggacggaccccgaactggccgcgttcatccaggaggaaggccgccgcgaaagcaacaacattgagctgatcgcctctgaaaacttcgcctccccctccgtccgggaagcccagggctccctgctgaccaacaaatacgcggaaggctatcccagcaagcgctggtacggcggctgcgaggtagtggacaaggtggaacagcttgccattaaccgcgtgctgaaaatcttcggcggggaccatgccaacgtgcagccccactccggctcccaggccaatatggccgtttacttctccgtattgaagcccggcgacaccattcttacgatggacctttcccatggcggccacctcacccacggccaccgcgcgaacttctccggcaagctgtacaacgtagttcactacggcgtatcccaggaaacggaagccatcgactatgacgcgctggaaaaactggccctggaagtgaagccgcagatgatcacggccggagccagcgcctattcccgcacgatcgactttgaacgcatgggccaaatcgccaaggcctgcggcgcctacctgttcgtggacatggcccatatcgcgggcctggtggccggcggacagcatccgaacccggttccctatgcggacttcgtctcctccaccacgcacaaatccctgcgcggcccgcgcggcggcttcgtgatctgcaaggaggaatacgccaagaagcttgacgccgccgtcttccccggcatgcagggcggccccctcatgcacgtgattgccgctaaggcggcctgcttcggggaagcgctgaaacccgaattcaaggactatgcggcccaggtcgtgaaaaacgccagggccatggcggacaaaatggcggaactcggcttccgcgtcgtctccaacggcacggacaaccacgtattcatggtggacctccgcaacaagggcatcaacggggcggacgcacaggaagccctggaccgcgtgggcatcaccgtgaacaagaatgccatcccgtttgacacgggttcccccatgaagccctccggcatccgcatcggcacgcccgctgtgaccacccgcggcatgaaggaaaaagacgtggaacaggtagcggaattcatcgcccgcgccctggccctgtacgtaggcgaccaggtctgcccgaacccggacggcttcgcccagctcaaggaggaagtctccgctttcaaccgcaacttccgcctgcctcactaatcaaattgctctttcacgttcaagccgtcccattgccagcaatgggacggcttgcgtttttcacaagaaaagagggaagtgccgggagctgcttcaaggggctcccctttccgcgttcaactccctccggtacactagcgaggatctgccgggatgtttcccccaccccctgccgccgccatataacaggcggctacatcggcaatgccatggccgttggaaaggggcgcgttctgcctggggatgcggtaccggccgcccaccaatcctccgccatacgtactgaccggatcacagtaagtggttatatggtccaagacgccggcagcggccgccaaacggtctgcacccagcgcctgcaaggaattaccagacaatcccgcagcattcaccgcaacgccgccaaccgggagaggagaccctacattggccgccaccccgaattgggccatgccgcctcccagggaatgcccggtggcctgcaaggacactattcccggcacatgattcaacaaatggcgaatcagtcccgccgccctaacgtagcaaatgtcacaggaatacaactggaaaatatccgtcaatacgttgggaaccaagacaccccaatgtcccgtatccgtcccccggaaggcaacataaatgttattgcccgagcacttgatgtaggcattaaacccatggcgcacatggacatgcccactaacgggatcgtacccggttgcaccgccaaaaggagagaaggcatgattcagggaggacaatggaacgcctggcagaagggctgcgtccggatgcggcgccattcccatcagataccctccggctcccggattaaggtaggcataccgggaaaaagtgatccaagtgggaatgcgggcaggataatgcgtattgtccctgtaatggaggcggcaacttatcaccgccgtcacaatgccggccaatatctggactaaggcggaatgccgggtcagaggcaaccccgaaagcctttccatgatataattataatgaggaagcgccgcatggccttcctgaacgagaaaggcatccagcctgcgccttccatcctggcgggaaaaatacctggttgctataaagtcaaacaagtgcctgagatgaagtaatggagtcatggtatttatcgaattgaattttgaatataattcagcacatcacgttcttcatccgtcagcgtgccgcccaattgctcttttctggacaaaatctcccgggagaacaggagggcgtcctggtatagagacgcgatctggttctgttccagttggtccagggcttcaaaccccttcagcttgcccaattgggtttccacccacttcctgatttcccgttcgccgggttcaggcgcagagttcgtaaacttttcccattcctccagccaggtattcgggatttccacttcagacagagcctggagcacttgctgctccagatcatccagcttgccttccagccgttccattttttccaggaactgcttttcatccgattccggaaaatggaaggatgaatcattatttttctcgtcagacatgatgtttcaacatgggttgcggtttgccgccgcatccggaaaggacgcgtccagcggcaaacgctgcacgaataccctggcctcccgcgtccggaaagaaaacaggggctttcccaatacggggaaccatcattcacaacagccatgcgcgcctttcagcggcatggaaaaacccggcatgaacaaatgccgtttataccgccaccgtgcggccgcagcttccggctacttcccttcccctcccaaacggctctccatggacagcagggtgcacttggcggcaagccatgcgtcccggcccttgagaaccatcattttatctcccacgctggaagcataggccttttccgcatcccgaaagagctgctccagatacttgaccagttccttctggacggcgatggcttctttcagagatccggcgttgtttcggcggaattccagcaagttcaagttggcccgggtcacttcctcccagggaaccatgccggacttgtactgttcctgcgccagttcagccatgctggataaaagccgttccctttccttgagaagggatttcaaggtttcttccgccggggaaacggccgaaaagcagacgagacagagtatgatcagggtagttttcattactccccttttatcccctcccttcattctgtcaagatggaaaggaacgtatcgctttgaaacaaagaagctctcgaagatgaaaaacagcgcggcacggacaaacatagccacctccggaaagaatccccagccgggaattctttccttttatcccgcctttctccttcttccggggtcgctcatacgccgccggccttccggaccggggcggaccattccttgccgcttacatccgtcagcactacggaaagcggaccttccggaaccgcagaaagcgcggcggggagtgttacgccggccctggcccccagcggaacgaccagcccgaaggcacccggcttgacctttgccagataagcgttctccatagcggaggggggaagcgcggaaagctggtccgcctccattttccacagggtgttgccctggccgtccgtcagcctgatgcggacgaggaaggagccgtaggtatccacgccttccgtgcggaatacgttgaagcgcaattcctgcccggacagggaggccccgctgacttccagcaggggcttcacggatttgttatggagcggcccccatacgccgccatgaaagaactggttggttcctagcgtgaccagcatcatgaacacggctccccagatggaaacgcgggccatgcggccgtatcccagcggcagcggaccggaccccacccaggcaaacagggaggaacggcgcgcgcagcacggaagtttggaaagcctgccgtccagcgaacaggaaccgcccccggtcaggaacaggagcagtccggcgcacatgcccagaatgcctatctgccattcgtccaggcaagtggttcccagccagccggaacccagcagaatgcccagcgccaggcagaaaacgcccacgctcgccaggcgcgtcagcagccccagcatgagcatcagccccaccaggaattcaatgatggtaaacgccaccatgaaccaccagagttcggacgggtgcgtcaccagatattcaatgaccggcttgattcccagcgcattgggaaggaagtggttgaatttgacgccgatatatcccggatcatccggaatcagcttgttttccagcaccaggcggcgccagaacgcggagaagtacgtccagcctactaccagacgcagagggagggccattacggcagcccagcggtaggcttcgggctgcacggcggaatcatgggaatgttcttctttcatctggtcaaattcttcagtattccgccatcctatttccgtcggaaaaaaatcaaaggataaaatgcccggtccgtgacagcggacgcgtcaaagatttaccgggaggccatgccgtcccacaccgggaagtaataatgcagggagggcgcgggttcattcagcaggcggtagtgccaccattccggagaatagttggcgaatccctgcttttcaaaagcctttttcagaatcatccggttccggtgctgggccggggtcaccagcgcggtgtccgtagcggaactggggtccagcaggtcatgatggccgcccatgtccacgggctttccggttttggcatacagcagggagacgtccacagccacgccgcgtgaatgttccgagaagtcgcgcacgtagtggtccccgaacaccttggccttgtcaatgttcgggtaataccgggctttcatcttctggtctccggcgtccgcgccccatttgcaaatgtccagcacggcggtgtgggggcggtaggcgtcatagatttccagcaggtagccctgcctgtacaggtcttccgagacttttttcagggcgtgcgccgtctgggtgcgcaggatggcgcgcctgccgtggtagccgtccagcggacgccccacgaaattgtcatacccggcatacttcaggttggtcttcaccagcggggccacctggtccacgtacacaaagcccggctgcatcacgggctggaggggctggttgaaagagggcttgaattccccgctgcctgagcaggaagccagtaaaatgaaaatgccgcatgccgcggccacgcaggtcttcatgaccacggagcgtagcacggcatgcggcgcaaatccggtcaggattccgtcatttccaggaatcccttgatcttgctgatgcgcgtgggatggcgcagcttgcggagggccttggcctcaatctggcggatgcgttcccgcgtgacgctgaactggcgccccacttcctccagggtgcgggggctgccgtcccggaggccgaagcgctgttcaataacctcgcgctcgcggtccgtaagggtgtccagcacatccttgattttctctttcaggaaggagaaggaggcttcctccatgggattttccgccgccttgtcttcaatgaagtcaccaaaggaggtgtcgtcggaatcccctacgggggcttgcagggaaatgggctgctgggccattttcagcacggaacgcacgcgttccacgggcaggtggatttcctccgcgatttcctccggcgtaggttcgcggccgtattcctgcaccagctgtttctgaacgcgcatcagcttgttgatggtttcaatcatgtgcacgggaatgcggatggtgcgggcctggtccgcaatggagcgggtgatggcctggcggatccaccaggtggcatacgtggagaatttgtagccgcggcggtattcgaacttttccaccgccttcatcaggcccatgttgccctcctgaatgaggtccaggaaggaaaggccgcggttggtgtacttcttggcaatggaaatgaccaggcgcaggttggcttccaccatttcgtccttggcccggcgggcttcgcggagccacttgcggagctcctgataggcttcccccatttcatccgcagtcatccacatgcgcagttccagttccgcaaggtgttccttgagctccttgttggacgggtcctgggctaccttcttctgcatgcggagcacgcggtcgcgggcctcgtcaatcatggagcagaaatcctcaatcaccttgtgcttgaagtacaggcggccgaagagcttcaccagaacgccggtgatcttgtcgaactccgcctggcgggccttcacggacttggcggcctccttgctgcggtacagcttgcgaaaggagccggaagcgtcctgatgggtctgctggatttgggcgcagagctgggccagccccttcatgtagcgttcgcgggagtcgatcttcttgtcaaggatgacgcggtcaaagcgttcctcgttgtccagcaggcggtaggccacgtccagataggcgttcgcaatgaagccgaagcggtgcacgcaacgctggacgttctgttccgcatcctcaatcctcttggagatggccacttcctcttcacgggtgagcagggaaacctggcccatctgcttcaggtacatgcggacggggtcgtccagaatgtccatcttggcttcaagcttttcctcctcgtcctcttcctccgtgttgatgcgggtgcggtccgtgtagctgtccacgtcggacgcgtcaatgatgtcaaacgccatgctgcgcaggcggtccatgatggcctcgtagtcctgctggtcaacgatgtcgttgggaagggagtcattgatatcgtcaaaagtcaggtagccctgctccttggcgagcttgatcagttcacggattttttcctggatttccggggcgtcaatcggattcgtgaccttgcggctggcggccctcttgcgttcctcttccaggatttcgctcaacttcttgggagcttccgccttagcggcaggcttggaggccttcttttcggcgggtttcttttccgccggcttggcaggagccttcttggcggcgggagcggcggctttcttggccggtgcggccgcgggcgcctttgccggagcctttttggcggctactgcggccttcccggcggcaggggccggagacgcctttttcaccggggctttcttttccgctgcgggcttggcggcagcgggctttttagccgccggagcggcggccttggcgggggctgccttggaagtggttttggaagtttttgcggcaggcttggatgctactttttccttggattcagaagcttttttgctggcggaagtcttcttgggagaagaggaggatgggtcaccggatttggacatatcttgaaaagaagagggcacaattcaccattatatcaatacccggaggtatcgaggcactacattgtacccagcaaacgcttcaagtcaacactaagtttggataattccagccttctggcggcgtccgtggaggggtccgccaattccgccatcagggacgcgatatgcctttccagcgcagccttcgcaatgccggagcaggcttcctggacgctccggtccacattggggatgggcaccgggtccaggttcagcaggttcagggcatcccgttccggctgtggcagggacgccagaaaagcctgaatggccgcgggactgtccggagaaggaagccgtgccaggatttttttcaggattccccccccttgcagcatccgcatcggctccagcaattcttcaatacggtctacgatgagcccctgggcacgggcgttctggagggacaactcgcaaagcacggccacggcacggtccatcttcacggggggctgcgtctgaggaacttccgcagccgccgcacgatccgcggactgtgcctgttcccttcccttgcggcgtccggccgtcctgacggcgctccgcaggtcattcacggtcgtgcgcatcctggtggcgacgtccgccgttgccaggtcgcgggccacggggtcgctcatgcaggccagcagggccgtcatctcacgggcaaaggcggcgctggcggcggcgtcagtcagcaggccgcgttccttggcgcgttcaatgcggacctcaaagaaaggacgggcctgctccaccatctctgaaaacgcttccttcccttccctcttcatgaaggagtccggatcgtccccctccggaagattcaccaggtaaacatccttgccgaatggggccagctcccggaaggcgcggtccgccgccgccatgcccgccttgtccgcgtcaaaacatacgacaatgcgggaggcatagcgtgaaagcgttctggcgtgctccggcgtgaacgccgttcccaggggagccacggcaaaggaaatgccggcctcatggcaggcgatgacgtcaagctgcccttcgcacagcagggccttgccgctcttccccatgggaccgcgcgccctgtccagggcaaacaccacatcccctttcttgaaaatggacgtttccggggagttgacgtacttgcccacgttttcctggggccgcagaattcgtccggagaacgccacgcattccccgtacacattgttaatggggaacatcagcctgtcccggaaccgggcgtacaggtccccgcgctctccgcggttggcaaggccggaatctatcaaaacctggtccggaagcccctccttacgcgcccaggccaggaactcccgtgaagaatcaggagcccagcccacctgccagcgcttcgccatgtccgccccgtatccgcgggaattcaggtaggccctggcctccgccgccttcggggagcggagcaggagcctgtgaaaaaactcggccgccttcttatgggccaccagcagggccgtgcgcgccttgcgccgcttttcctccgcggcgtcatacacttcctccaccagggtaatgccggctttttccgctagccgccgcacggtatccgcaaagcccaggttttccatcttcatcacgaaggtgatggcggatcccccttccccgcagccgaagcatttgaagttctgccgggtctggtccacgatgaaggaaggcgtcttctcattatggaacgggcagcacgccttccaccgggacccggcccttttcagggaaagataggaacccaccacatctacaatgtcagtggcttccagaacgcgccggatgctgtcttcatcaatccttcccataaggcgcggccagtctatcacagccccgccgggtgcacaagaagacagaatcaggacgccattcacaggaaaacaaggggaggaaacaaccgggcgcgcactggaaaaacagaggagctcccgtgttccctcaggaaaaccgggtgaaacggcgcggcggcatccggcctccccgtccgcacggaacgcatttccccattgagcgcgggctcggaacgtgttagcctgtctgcatgaagcacattcaccttctgttgctggctctgctggccctgtttgccggctccccgttccgggcggccgcggaggaatccttccgcgaccgggtagtggtcattccggtgggggaggactccctgaccagcaagcagagcttcggcttcatgaaccgcatcctgaagcgggcgcaggaggaacaggcgcgcgccgtggtgtttgacctgaacacgcccggcggcctggcctgggaaaccagcgagatgatgatgaaaagcatccagccgctgaccatccccacttacgcctacgtgaatcccaaggccatgtccgccggggcgctcatctccgcggcgtgcgacaagatttacatggcgcccgtctcctccatcggcgcggcgggcatcatcacctcctccggggaggagatggaccccgtcatgcgcaagaaggcggaaagcgccttctgggccttcacccgctccgtggtaacggaaaagggctaccgcccggaagtagtgaaggccatgatgatcccctccgaccaggagcagcaattcggccccgtcaagctggaaaaaggcgcgctcctgaccctgacgggcaaggaggccgccacgcggctggaagacggcaggcccctgctggcccagggaacggccacctccgtcacggacctgctggcccaggagaaggtggacgcccccacggtcacggcggaacccaccgcctttgaacgcatcggcctctggattgcgtgggcctcccccatactgatcctgctgggaatcggcggcatctacatggaattcaagacgcctgggttcggcatcggcggcatcgtggccattgccgcgtttgccctgttcttcttcggcaacaacatcgccgggaacctggccggttatgaaacggcggccctgctcattctgggcgtggtcctgctgtgcgtggaattcttcgtcatcccgggcaccttcattgcggccattgcgggcggtatctgcatcttcctggccctgttcggcggcatgatcagctcctgggaatgggaccacatcatccgggacggacagtgggacgacgtcaacacgctggcgatggtcctgggcatccccctcctgaaactggccctgggcctgaccgggggcgccatcctgatcgccgtgctgatgaagtacctgccggactccgtcctgatgcgccgcgtcacgaacgccacgatcagcggtggccccgccggggaagccgtcaacattgcgcgcgtgcaggtaggcgaccgggggaacgccgtcacggaactgaagcccaacggcaaggccatgatccatggcgaaatatgcgaggttttctctcgacaaggcatactgattaagggtacccctgtgcgcgtcgtggacatccgtccgttcgacctcgtcgtcgtcaaggacgaatccccctccggggactgacgccatcacgcttttcactcactgccatgcctctcaccgttggactcatttccctgggctgccccaagaacctgatcgactctgaaatcatgatcggccacatgcagaaggccggcatgaccatgactccggaacctgagctggcggacgtgatggtggtcaacacctgcgctttcattgaccaggccaagcaggaagccatcgacgccattctggacgtcgtgcgcgccagggaaagcggagcctatccggaaaaccagaagctcatcgtggcaggctgcctgtcccagcgctttcagaaggaactgcccgccctgctgccggaggtggacgccttcatcggcccggaccagatcaccaggctcccggaaatcatcacggaggtgatggaccggaccgtgcaggaccggaacttcatccaaggcaagtgcaagtatgttccggactgggacacgccgcgctaccgccttactcccccgcatacggcctacatcaagatagcggaaggctgcaaccacggctgcgcctactgcatcatcccgatgatccggggacgccaccgcagccgctcccagcaggacgtggtgcgtgaagcggaagccctcatccggtccggcgtgaaggaaatctgcctcattgcgcaggacattacctactacggcatggacaaatggacggatgcgcgcccgaaccgccgcagcgcggtggactcctcccgcggggaatccctggcctccctgatccgcgccctgaacgccattgaaggggaattctggatcaggcttctttacacccaccccgcccactggagcgacgaactgaccgccgccatcgcggaaagccccaaggtggcccgctacgtggacatccccctccagcacatttccgacaacatgctcagcgccatgcagcgcgtgacggacggggactacatccgcaacctcctgcgggacatccggaaggccgttccgggaatcgccatccgcaccaccttcatcaccggattccccggagagacggaggacgaccatcaggaattgatggagttcattgaggagttccgctttgaacgggccggcatcttcaccttctcacgggaggaaggcacgaaggcctacaagatgccgaaccaggtgcaccaccgcaccaaggcgcgccgctacaatgaagccaccatgctcctgacccgccttgcctcggaaacgggccaggaacagatcggcaggcaaatccgcgtgctggtggacgctcccggcgttgccagaacggaatgggacgccccggacattgacggcaccgtttccgtccccctgacgctgcccgtcggccaattcgccaccgtcaccgtaacggatgccgtggcgtatgaactgacggcggaataagattccgcgggcgactggatgggagcatcagagacaagagcgacaggcacggcgcaagccgggatatatctgatcccttatcactcatctccggcatctgagccaaaggcgcttattgtttcacgcttgattccgggagaggcgcgctggccggaggggcttcctgcggtgcggctcccgaaggtgacggagaagcggaatccggaacggggaccagggaagtatccatccgggacaaatccagttcgcgggaagccgcagcggcttccggactgacggcgcccatgttcgcgggcaacggaagcagggctccgtccggaccgaccatgtcgggagcggtgacgggataaaagcccatcatttcctgtggattgacgatttccgacaggctcacgtaaccctggctgccgtcctcaaactcaaccttggcgaacaaatcaccgcaaaccagcaccttcccggttttcacgccgcccctgacggttccgctcgtggaaaaattattctccggattctgctcgaacaccatcattttttccttcttgaacgtaacggattcccccggcttgtaaaatgcctggtccgccttgttcttggccgccattttcttggaagtgatgcctacgggatccagcgctgaactctggcggtcccaggcattcaaatgcttgttcggaccacaggaagccagcagcaccagcagagcggaagggagaagtgccaatttcatttgccgggcatcttaactgccacagattgcggatggaagcagaatttgcgcctgttgatgcaggatgccgtttcaacaagaaaaatcccggctttcccgccaataagcgttccttcgtgctggacagtcaagaaaacttccgtacaggcttgcggcatatcaacctcacttccaaatgatcaagggatttttcccggcgcttttcctggttgtttcgtcatgctgcatgatgaaggcaaaagaaacccagggcaacactctgatgcgccccctgatgactcggacggcgccccctcccttgccctgccgcgggtccggcgcctgcttcgattacttctccacgccgctctgcaaatacaaaatccgcagggcggaagaaatcatgcccggctcctgccgggccccttcacttcatggaaggaagacggaaaaaagcagagaccgggactttccatcaacaaacagggaaccccggccatcatgctgttccccgcggcggaacccattccatccctgaaacacgctcccggcaggcagccggggccgggaaaagtaagcggttccgcaggcggggaaaaacaggccgtccttacggattcccttccccgctctcttcccggggaaacctcaaatcatggcgcaaaggcaacgtattaggcttgccgcattcctcccggcaatgctattctgccacctgcggttcccacgtttggcacagttccatccgggggaaccgttcaagcatttgttctgttatggatgagaagagattagccggcgtagttctgccattgttctccctgcgccgcaacaacgaccacggcatcggggatctgacggctctgcgccagtggattgactgggcggcggatgcccatgtgggatttctccaattgctgcccgtcaacgccctgggccgggacgaaaacccttccccctattccgccatcagctccgtggctctggagcccctgtacctttccctggaaccatggaccattcccggcctggaagaacgcgtattcaatgaaaccggggacacgctgccgtgggaacaaccctccggcccgaacctggtggactaccccaaggtcaggttctggaaaatgtggattctgcggggcgcatggaacaactttaaaaccaagccggaatatgagggcatcatgcccaagttcagggaatgggtgaaggagcagggaagctggctggaagactttgtctgcttccaggttctctgcgacctgttcggcacggaaatctggtggcactggccggagcaggacccggcccgggccaaaaccatcgccgccgattacgaggaagaaaaggactttgcccgctggctccagtggctctgtgaaaagcaatgggaattcatccggatttatgcggacgaacgcaacgtgaaactgatgggggacatccccatcggcgtttccctgtgcagtgcggacgtcttttttgaacgctacctgtttgatacggactggtgcggaggcgctcctgcggaaggcaactacgcggaagaccccttcacgggcaaatgggggcaaaactggggcattcccctgtacaaatgggaagtcatggcccaggacaacttcgcctggtggcggcgccgggtaaaatactgcaccaagattttcagcatgtacaggattgaccatatcctgggcttttaccgcatttactccttcccgtggaagcctacggaaaacgaggtcttcctgccgctcacgctggagcaggcggcccagagaacgggcggcaggctgcccggcttcaagccccgcggggatgacaacgccgtggaccgcaacctgaacctgacggacggagacctgtaccttcgcctcctgatctctgccgcccccggcgtcagcgtggtgggggaagacctgggctgcgtgccggaatacgtgcgcccgaacatgcgccaattggacattcccggcttcaagattccccattgggaaatcaaaccggacggcaacatcatccccggaaaggaatatcacgaatgctccttcgcggcattcggaacgcatgattttgaaaccatcatgcagacctggaacgacagctacgccaaaatcgagcgtgcccgcaagctgggtctgtgggagggagtctctcccaaaacgccgtccaacccggaacaggaaaacatcgtgcgccaggcggaggacggagcgcgcctgctgaaatggtttgcggacttcgccgggatgcagccggacacttggctctcctactggaacctggaaatcaagacggccatgtacaatgccctgttccgttccaactcccgttacgcggccattctctggcctgccctctttgacgtcaacaagcgcctgaacatccccggcaccacgggaggcaccaactggagggaacgcatgccctttaaagccgtggaagcccataacatgccccagaccgcgtggctacgcaccgtcatcagcggttccgaccgcacgccgctgcagggagaagacgccatcagggccctcaagtcagccagaaggcgcatcttcccgaaggtcaccgtcaacaacgaacgcttcctgaaacggatgctgatgtggcccaacgggaaatccctgtaagttccggccagtttccggagcgccgcaagcccctgccccgcttcatggcctttccttcaactgttctttccattgcatccgtccttgcctcctgccggaaaagcaaccatactccccgcatgacctggagctggaacaaactgtcccccgccaaatgggaagacgcgtggagtgaacgcattgccggaaatcccaatgcctccatcaccatcatcaagggaggcaagaccatcagaatcaccgtctactgcgaccatgaggaagacgccctgaccttgaaggaatattttggggggaccgtccgggaaatcaaaacccgggactgggtggcggcgcagagccgggaagaacgcgctccgcttaaaataagggatgccctggtcattacggagcagagttctccggagaagctggccgccctgcggaagcaattccccgcgcgccatatcctgagcgttcctgcggaaatggccttcgggaccggagaccatgccactacgtccacctgcctgcgcttcatctgtgacgctgccaaatcccgcaggggaaccgcctggagcatgacggacatcggctgcggaaccgccgtgctggccattgcggcgctgaagctgggagcggaacacgccacggccttcgactttgaccccatggccattgaagtggcacggcacaacatggaacgcaatgacgtcaccggcgaagagcttgatttattcgtcggggacgtctttgaatggacgcccgcagcccggcagaagggggatctggtcgtcgccaacctgttttccaccatccttcaaaaagccttcccgcacatcatcgccgccatgaagaaggatgccgtgctggtcatttccgggattctggcctcccaatgggaagaaacgaaatccgcggccgaacgcaacggactttcctttgaccgggtcatcaaacgcggcaaatgggtcacagccaagggcggcatggtgaagtaagcattccttcacggggcatggaataacacttgccccggcatgccaatcaacatccaactgggaaccagggcctcccggccctggtgttcttcatcacggataccctcccgtcatccagcgcgtactccttgaacaaggttttttcagggccggaaagccctgttcccggcaggaagtaccttcacaagccagcggaatgcaccgtccgccctgcacaagcatcaatgcgccccgcgggtttcacactttgcctcactctccggaaagcctcaccccgccgcgttttcacgggcagtaaacagcttttccacatacttggccagcatatccacttccagattcgccggctggccggaaacggcgcgctgcaggttcgtacgtccgaaggtatggggcgtgatccagaattcaagcagggagccgttcaaattcgcaatcgtcaaggaaatgccgtcaatggtgatggagcccttatcaatgcagtagcgggccagttcatccggaatgcgcacttccaggcggtggtcctgccccacgggctccagggccgtaatagttccggtattgtccacatgccccatcacgaagtggccgccgaagcggtccatggcggacatggcgcgttccaggttcaccagcccccccggctggaggtttcccaggctggtgacgcggagggtctgggaaagcaggtcaaaggagacgcgctcaccgtccagggcgtccaccgtcaggcagcagccgttgacggcgacggaatcccccagggaaagttcatggccgaatggaataatcagcgtcagtctggctccgccgttgatgggcgtaaacccttccacggttcctgttgtttcaacgagtccggtaaacataagagtaagctccggttccggcccttaatggccgaagcaggtgaagaagatgaacacgatggcggtgggaaaagccgcccaggcaaacagccacaggggattgatgcccttgaagtacttgcccagaatggcctgccccgccgggttgggggcgttggcgattaccgtcaggccgccgcccgtcacggcgccggccaccacggaatacttgacggcttccggcaggttgggaaccgtggacgccaggaaggtgacggcggcattgtcgttgaacgctgtcagcagcgtggccccgatcatggcgtagtcccccagccgcgtcagcaccggttccagccaccaggcctggacgccgcccagaatgaccaggcccgccaggaagaagcccaccatcatgggaacgcgcagggacatctggttctggtactgcggggtagccaccgtaaagccaatgaagaagaggaagctgccgatgaacatgaccggctcatgggcgaagagaaccgtccaggtcagaaagcagacgtgcgccagcgtcacccacgccggtatcttgtcattgcggtcttcccaggactggggaacggcgtcgtcaaactcgttgaactcgcgttgctgggcggccaggcgggcgaattccttgcggaagaggaaaaagtaggccaggttggaaatgatgatggctgaaacggccttccagccgaagtgctggatcatgtgcgcaagaccccagtcccacttttccgccaccatcaccacggggggggcggcaaaatgcgtcagggtgcccccgatggaaatattcacaaaaagcagccccagcgttgcatacatcagggtcttcttcggcttgaggtcgtaaaacttcttgctcaggatcagggcgccgatcgtcatggcggcaggttccgtaatcagggagccgagcaggggggcaagggtcatcacggaaatccaccaggccccgggcgaagattttccaagtttggcgccgtagttgactacggattccgccagcttgaagatggggcgggaagaggcgatgatcatgataatcatcacgaacatgggctccgtgaaggagcagtcgtaattcaagtaggccgagaagtcctcaaaggaataatacttccagcacacgaacatgaaggggatgatccagatgccgaacacggcttccacttcccccaggaaatggaagatggcggacgcgaaggagaccggaagacgctcctccgggtgcatcacgcggaagttggtttccttgagcttttccttgtagcgcagggccagcttgtgggaatagcgttcaaaccgcccggccaggaacgtatggataatagcccccaggaacacgagcgtcacggccaggttgaacccgccggactgcttgttgcgctccgtgagcacctgggacaggctggcatccggcggcgcgggcttgtactggttcaggggaatgggaaaatggctgtactgtgattccccccccacttccgtagcgggataggcaggttccgccgcgcgagccgaagcttcaccggcaggagcccccaggaaaaaggcggcggcagccacggtagtgagcagacccgcacggcgcgccagaactttgaagaaatgacaaatacagctcatgtctgcggacagactaaacacctcccctttcttccgcgagctgaaaatgagtctgtatgctttttaacgggaacgcgttcaggcgggaaaagcccgcacggacctgaaaaggagcgcgcacggcagggaaaaggctgtcatgcctgcctgagtttaaggttgaacaggaaacttaaaaatagtagttgcaggtatgcgctccgccccaggcctcctttccattttcttgattgcagccggtgtcgcgtgcgcggagcttccgcccgacctgccgcccgccactccccttcccctcgcgcccggaccggtcatcggcggcactatcaaggggaaccctgccgccggcgttgtccccgtcagggaactgattgaagccaaccgcaggaatgaaaacattcccatggcggaacccattcccggagaaacggtttcctccatcccccaggcggagcccatcccgaatgcggagcctattcccggggaaacgaacctgcatgccccggtgcagcccgcaggcccggtcccggtcattcctcccacggccttttcccccgttccggttccccagcatgaaacccgcgttgccatcctgggctatcatgatttcagccgtacccttcccgccacggaaatgcgcatgaatacggacgtgttccgcgcccagatgcaggccctgaaggccagcggcgtgcccgtcatttccatgaaggaattcctggaatggaaactgggaagcaggcagctccccgccaaatgcgtgatgatcaccattgacgacggctggaagagcgtttacacggatgcctaccccatcctgaaggaaacgggattcccgttcaccgttttcccctataccaaattcatcacgggccgcggctccgccatgagccatgaccaaatccaggaaatgctggataacggcgccacgctgggcagccactccgtcagccacctgtaccccagatcatggcgcgccgcccagcggaagggaacccaggcggttctggacctggctacggcggaaataagcaattcccggaaaatccttcaggaaaaattccccggttccgccgtggaagcctactgctacccgggcggattcgtcctgccggacatgatcaccaaggcggaggaagccggattccaggcggccttcacggtgattcccaagaaagtaaccaaggacacggaccgctggcgggttcaccgctacatggtttttggcaaggatcccaagacattcaccagagccctgaatttcaacgtgcccacggctccggaaacgccgtcggccactcccggcaacaatagcagcagcgggaacagcctgaattcctatccggccccggcccagcctgtctacccggcggccaataccgtggtgaaaaaccagaacccggacatctccatttccctggcccgtgaaccagccttcgatcccaaacaggtggaaatgcgcgtttccggcttcggcctggtgaatgcccagtatgaccccaaggaaaaaatcctgaaatggacgccttcccgccccctgcgcctcagccccgtaaccgtccaggtgcgctggaaaaaccttgccgccaacctgtggcagacagccacctggcaattcggcatcgcggagcaggaaatgcacttcattccccagaatgtagtcaaataattccggctgctgtcgcagccatcgtccctccggagcgcgggtaaacgggcaaccggaaacttcatacccgtgttttccgccataaactccttcctgggaacaaggggctccggccccttgtaaaaactccgaacggaaaaagagatggcactctccctccgcaatgtggcggaaaaagctcctaaaaacccgcaagtctcaaaacccctgagaaaccagggctctttccagcaaattgaagggagcgctgcaagctcttgcggcagctgagagcatatgcggccagaagccgcatcttttgcaaaacgtgagaaaatggagaaaatcattaacaccctctccgttctcctgcggaaaagttttatgccggaaaatccgccgccctctcttcccggacatagagtcctccggacagaaaaaaatatccccggttcatgtttttcctgccgttgcagacggcatgggattccaaatgcattcctcctcccattcctcctctcccacacgggggctcaatgttagaatagcctaacattcataagttgaggagacttccgcatcaacacggaaagctcccccggaatgccaaaaaaactgacatttggcttgcccgcatggtgtgaagtggcataatcatttggcaccattatcaggttcagccaggcacggacatccacatgaagacgagcactaaaactttcgccattgcagatacagccgctaacgcagactatctcaccaatacttccgaaccgctcggagaaacgatgaccctgaacgtgggcccctcccaccccgccacccacggcgtgctgcggctggtgctggaactcgatggtgaagagatcattagctgcgatccggtggtgggccacctgcaccgcggcatggaaaagatcggggagaccatccagtacaaccagttcgtcccctacaccgaccgctttgactacctggcccctctttccaacaacatcgcctatgcctgcgcggtggaaaaactgctgggctgggagctgccgccccgcgggcaggccctgcgcgtgctggccctggagctttcccgtttttcctcccatatcctgggcgtcggcgtgtacggcatggacgtaggcgccatgaccgtgttcctgtactgttatgaggaacgcgaaaaaatccataacttttacgaacagctcaccggagcgcgcttcacctcctcctacacccgcatcggcggacagacgcgcgacgtccccaatgaaatgctgaaggaagtgctcgtcttctgtgatgaagccgccaagaccctggatgaaacggaagccctgctgctcaagaacaaaatcttcatcgaccgccttcagggcgtgggcgtcatcagccgtgaaaaggcgctctcctgggccattaccggagccaacctgcgcgccagcggcgtcaagcgcgacctgcgcaaaaccaacccctacctgggttatgagaattacgagttcgacgttcccgtgggtgaacacggcgactgctacgaccgctttaccgtgcgcattgaggaaatgcgccagtccctgcgcatcatccgccaggtcattgaaaccatgccggacggccccatcaacatggtggacaccaagggcacgctgcctgaaaagaaaaaggtcatgacggacatggaatccctgatccgccagttcatggccaccaccatgggcgtgaacgcccccgccgggcaggtttactttgccgcggaaaacccgaagggcgagctgggcttcttcctggactccaaggggggcggacttcccaaccgcctgcgcatgcgctccccctccttctgcaatctttccatcctgccggaactgctgaaaggccacctggtttccgacgttccggccattctcggctccttcgacttcgtgatgggcgaatgcgaccgctaaacacacgcttcccttttcctttccaactcaaacaccaaatttcctccccatgtccgattacgctgaaaacgccatcgacgcgactatcgcccaccagcccagcccgggcgaacggttttacccggcctttgaagtaacgccggagcttgacgccgccgccagcgaatacgtcacgcattatccggaaggcaagcagaaatccgccgtgcttcccatcctgcatgaaatccagaaaaaattcggcttcatcagcgcagacgccatcacctgggtgggtgaaaaactgaacatctccgccgcccacgtgctgggcgtggtcaccttctatcccggcctgcgccagatgtgccccggcaagacccacatccgcgtgtgccgcaccctctcctgcgccatggcgggagcggacagcctctttgacgccatctgcgcgcgcctgggcattgacaagagcggcattgaccatcaccaccccatcggcgtcagcccggacggcctgtggagcgtggagggagtggaatgcctggccaactgcggattcggccccaacatgatggtcaacgaccttctgtatgaaaaagtcactccggaactgctggaggaagtgatcgccaagcaccagaacgcctaaccctttccaccccgcaccagattttcgccatgagcatcacctatcttcccggtaaagaaccccaccccagggaaacgcgccgcatcctgaaaaacgtcaaccgcgaaggatggaacacttccattgactgctatctggccgacggcggctatgaggaactgaaaaaggcgctcggcatggagccgaaggccgtcattgacgaggtgaaaaaatccggactgcgcggccgcggcggcgcgggtttccccaccggcgtgaagtggaccttcattccgccgaacaacacgaagcccgtttatctggtctgcaactgcgacgaatccgaacccggtaccttcaaggaccgctacatcgtccaccaggacccccaccagctcattgaagggatggtcatctccagctacgcggtaggcgcgcacctggcttacatctacatgcgggaggaattccccattgccgcggaagtcatgctcaaggcccttcaggaagcgcgcgaacgcggcttcctgggcagcaacatccagggttccggctacgatctggaaatccacgtgcaccgcggcgcgggcgcctacatctgcggtgaggaaacggccctgctcaactccctggaaggccagcgcccctacccgcgcatcaagcctcccttcttcccggccgccatcggcctgtacggctgccccaccatcgtgaacaacgtggagtccctctgccaggtgaagcacgtcatcgccatgggcggagaagcctacagccaggaaggtgcccggcgctcccccggcacccgcatcatcggcgtttccggcgacgtgaaacgcccggggttctatgaaatcgtttccggctccatgaccttcggcgaactgctgtatgacgtctgcggaggcccgcgggacggccgcgagttcaaggccgtcattcccggcggctcctcctccaaggtcatgcgcacggacgtggaatacaaggtgcagaacccggacggcaccatgggcaaaatctccttcttcgacattccgctggacctggacagcatctcccagcacggctccatgtccggctccggcgcggtcatcgtcatggacgactcccgctccatgccctgggccatgaacaacatcaaccgcttttacgcgcatgaatcctgcggccagtgcaccccctgccgagaaggctgcccgtggatgatgaagctcagcacccgcattctggaaggcaaggccgccccgtccgacgtggacctgctgattgaagtggccaaccagattgaagggaaaacggtctgcgccttcggtgaagccgcctcatggcccacccaggccatggtctccaagttcaaggaggaattcgtggccctgacggatcccttcaacgcctgcctgccccataccagggaaggccgggaacaaacccgtttcctcacccgctaacagcagaacgcaacaccacttttcaataccatttccctcccatccgtcatcatgagtgaagaagcttccaaactccccaaagacattgccgccgaggaaggcaaggtgaacgtccagatcaacggaacgtggcaccggttcccgcgcggcacgcggattgcagacgcctgccgttccgtaggcgttcccatcccgtgcttctgctaccaccccaagctggccgtcgtcggctcctgccgcatgtgcatggtggaacaggggatgccgcccaggctggctccgggccagactccctcctatgatgaaaacggctaccagcgcatccagtggatgccgcgccccatcatctcctgcgcgaacacggtggcggaaaacatgggcatccgtacggacagccccctcgccagcgaggcgcgccgcggcgtgatggaattcctgcttaccagccacccgctggactgtcccatctgcgaccaggccggggaatgcaagctccaggaatactccaacgactacggccaggtggaaggccgctatgaggaaaagaagaccaagaagggcaagaacctgagcatcggcccgcgcgtgaacctggaccaggagcgctgcgtgctctgcggccgctgcgtgcgcttcatgcgcgacatcatgcatgacgaagttctcacgatggcccagcgcggcaccttcaacgccatcacggtctatccgggccgtgagctggacagcaactactccctgaacaccgtggacctctgcccggtaggcgccctcacctccaaggacttccgcttcaagatgcgcgtctggttcctgaaggaaaccaagaccattgacgtggactgcggcacgggcaccaacatcatcctctggacgcgtgaagacaaggtgtaccgcatcaccccgcgcccgaacgacgccgtgaactcctgctggatgccggactcccaccgcctgaattacaaatacatcaacgcggaaacgcgcattccccagcccgtcatacgcacggacgcgggagcgccccaccgcccgtccacctgggaacccgccctggcctccgtcacggaagccgtcaagcgcgtcgccccgcaccagctcgccatcatcgcctccgggcgcatgaccaacgaagaactttacatggtccgccacctggccgcgcaaatcggcacggacatggtggacatcgtcccccgcatgggagaaagcgacggcatgctgatcgccgcggaccgcaacccgaacacgaacggggccagactggtactgggcattgaacccggctccaggctggccgccatccgcgacggcgtgcgcaacggctccatcaagggcatcctcacgctgggggaagacctcaccgccccggaagccggcttcacggcggaagacctgaaaaagctggactacctgttcatgaccgcccacagcgtgaatgaaacggcgcgccatgcggacctggttctgccgggcgtcacgtatgctgaaaaattcggaacgatgatcaacgtcacgggccgcattcagcgcctgaaccgcgccatccagcccgtgggctacgcccgggatgactggcagattttccgggacatcacccttctgctgggcggcaaccccgcgctgaaagacttcaactccgccctggacgtcctcaccgtcatgagcacggaatacgacgcccttaacggcgtcacctggggctccatcggagacgggggccagcccattctggaaaccggcgtcaccatccccgtggtggaacatgaaaaaagccagggccgctaatcacacttcacacgcacacaacctgttaatccgccatgattgattcgattctaaccttttgcgacgaagtgctcagcaaccctgtgtggttctacgtcatcaccctgctgatcaaaatcgtcatctgcttcgccatcaccatcctgttcattccggtctgcgtgtacattgaacgccgggtggccgcctggattcaggaccgcgtggggcccaaccgcgccggcatcccgctgagcatcttccgccgcttcggggctaagtccgacctgccgttcaaaaagacgctggactacttcggccttccccacgacggcaaaatcgccaacctgtgccgcttcttccgcctggaccgcgacattccgatcttcggcctcgtgcagcccatggtggacggcggcaagctgttcctgaagcaggacttcacgcctcccttcgtgcgccgcgtgtacttctggatcgcccccatcctggtgctggcccccccgctgatgacggcggccgtggtcccctttgccggggacctgcacacctcctacggcaacgtaaacatggcggtggccaacctcagcgtagggcccctgtggatgttcgccatctcctccctctccgtatacggcctggtgctggccggctggtcctccaactccaaattccccttcctgggcggcgtgcgctcctccgcccagatgatctcctacgaaatcagcatgggcctgtccatcatccccgtgctgatgatttacagcacgctggacctctccaacatcgtggaataccaggccgccaacggatggctgctgcttcccgtgtggggcgagggcctgagctggcagcgctggattctcctggttcccatcgccatcagcttcatcatcttcctgacctccatcttcgcggaagccaaccgcacgccctttgacatgtccgaatgtgaaacggacctcgtgggcggctaccacacggaatactcctccatgaaattcgcgcagttcttcatgggtgaatacgccgccatggtggtgggctcctccctggtcatcacgctgttcctgggcggctggtccatcggcttcggcctggacgggtggctcaacgaacacgtagccaactgggtgacggtcatctgccagctcatcgcgtacgtgctcaagcttctcttcttcgtcttcttcttcgtctgggtgcgctggacgctcccccgcttccgttacgaccaggtgatgaagctcggctggatggtcttctttgaactggccgtcatcaacatcttcatcacggccgccatcctgtacttcgtcaagtaatcaaccttcttcatcccgacaacatcactattatggccttcaaaacgatcaagcgcccgaagatttccctcggagagcggttctacttgcaatccatccttggcggtctctggatcaccatcaagcacctcgttctggctctgctgggcaaatcccgcaacaagaaggaactggccggctccggcataggagtcacgatgcagtacccggaattccgctgggacaagcacctgccggaatactaccgcggggctcccgtcctggtgaagggggaagacggccgcgaacgctgcgtgtcctgccagctctgcgaattcatctgccctgcccgcgccatcaccatcacccccggcgccatcaaggaaggcccctggggcaaggtggaaaaagcgcccagggaattccagatcgacatgctccgctgcatctactgcggcatgtgcgaggaagcctgcccggaacaggccatcttcatgagccaggactacctgttcacccccacggacaaagcccaggccatccacaacaaggccaagctctacgaaatgggcggcacccgcaagggactggtcaacaagtggaaccaatacaaataaatcaccccgaaacattcactccaatttccgtacgttatgaacatttttgccagtgacatactcttttacgtcttcggggccctggccgtgatcctgtccctgatggtcgtcttcatgcgcaaccccgtttcctccgccatgatgatggccctctccttcggagccactgccgccattatgatcgggctgggcgcccacttcctgggcattctccagattctggtatacgccggagccatcatggtgctcttcgcgttcatcatcatgcttctgaacgtgaagcgggaaacctcccccttccggcggcccgtatccgtcgccatcggcgtcatcattgccggcctcttcctgggccagctcatcggcatcatctactccctgcccggcgcgaaggaaacgcaccgctgcccgatggccaccgcggaacaggcatggaacgatctgaagatcggccaggacagcgccaactccgggaaaacggaaaccaacaacctttccggggaatgcgcgcagaaaccctgcgttgcttccggcggatgcacacgaggatcggactatgccatcaccaaggcatctcttgaccaattgctccattccacctgcggcatagcaccgtccatcaccctccctcccctctccccccaatgttccgcacacctctatccggaaggcaccaccatccgcgcggaaatagacaacggggaattcccggataccgccctgctgggccgcaccctgtttgacaaatacaaccggagcctggtcatcgccgggctggccctgctggtagcctccatcggcgtcgtcgtgctgagccgccgcccctccggcaaataacccgaaccccttaccacagccatcatcatgatacctcttacgcattacctgatcctctccggcgtcctgttcgccatcggcctgatgggggtgattgtccggcgtgacatcatcgtcatcttcatgtgcctggaaatgatgctcagcgcggccaacctgtccctggtggcgttttcacgcgcccagggcaccatggggctgcccaattacgacggacaggccctgtccatcttcatcctgaccatcgccgcggcggaagtggccatcgggctggccctcatcgtctccctgtaccgggccaggcgcacggccagcacgcaggacctcaacacgctgaaagactaagagcaacataccactccacgaacatgtttaatattgatattcaatacacctggctcctgctcttcctgccgctggtcgtagccgccttcaactggttcctgctgacccggcgcccgaacgtcgcggccctcacctccaccttctcctgcctggcgaccttcgttctttccctgggcctgctggaccagaccggctcggactccttctcctggcttccgatctccgacgtcttttccgttgacctgggctttgtgctggaccccctttccacccgcatgatgctggtggtcacgggcatcggcctgctggtccacatcttctccctgagctacatggcggacgacaaggcgaaaacgcgctacttcgcgtgcctgagcctcttcatgttctccatgacgggcatcgtcctggcgaacaacatcgccatgaccttcatcttctgggagctggtgggcctttcctcctacctgctcatcggccactggtacaccagggacgccgccgcaaacgccgccaaaaaggccttcatctgcaaccgcgtgggggacttcggcttcctgatcggcatcctgaccctctgggcgctgaccaacacgctggacttcagcctgatggaaatgcccgcgggcctcagtgaaaccctgctgaacatcacggtgctgtgcctcttctgcggggcggtgggcaaatccgcccagttcccgctgcacgtgtggcttccggacgccatggaaggccccacccccgtctccgccctgatccatgcggccaccatggtggccgccggggtgtacatgatggtgcgcgtccagtactccatcggcgtggaagccttccccgccctggcctgcaacgtcattgccgtcatcggcgccgtcacggccgtcatcgccgccttcatggccacccagcagaatgacatcaagcgcgtgctggcctactccaccctctcccagctgggctacatggtcatggccctgggtctgctggccggggaagcggccatgttccacctcttcacccacgcctggttcaaggccctgctcttcctgggcgcgggcgccatcatcttcgcctgccaccatgaacaggacatctggaaaatgggcggcatcatgaagcgcatgaagctgacctccctcaccttcatcatcgcgaccatggcgctggtcgccattccgttcacgtccggcttcttctccaaggaagccattctggaagccgccctgcacaaaaacccggtcttcttctggatcggcgcgggcgtggccctgctgaccaccttctacatgatgcgcgtgatcttcgtggtcttcttcggcaagagccgcagccacagctcggaacacgccacggaagtgggcggcctcatgctggttcccctgctgattctggccgtgctggccctcatctccggctacggcttcatggctgacaggctggtgcccttcaacgggttcgtttccgaaagcttccatatcggcatgcccttctacgtctccatgggggctctggtgctcggcatcctgctggcggccgttttctatgcgggctccccggcctccgacaagctctccggcaacgccgtttcccgcgccctcgccaaccgcctctacattgactggttctatgacaaggtgctggtcaggggcatccagggctccctggccgccatcatcgacttcatggaccagttcatcatctccggcctcatcgtgggcggcctggcgcggctgaccgccgccgtgggctccctcctgcgccgcctccagtccggcagcatggccgcctacacggccctcttcggcatcggcctgctcctggtcatctacttcaccgtcttctattcctgctaacctaccaaccaatcacacaccatgcttatctggcttgttctcattcctctgattgccacggccctcatcggtctgtgcaaggcgcccgcacgcccgacagccctgctcagcgccacgctgacgctggccctcggcatctgggccctggttagctttgacggctgctcctcctgctggtcccgctttgaagggatggacctccagctcaccctggccccggccctggccaaagtgatgctgctgctgaccatcctggtgaccttcgccaccgtgctgggcaccaatccgcccaagggaggggaagcctcctggtacaactccgccctgctgatttccgcgggcgccaccggggccttcctgtccgacaacatcatctccttcttcgccttccatgagctggccctcatccccaccttcgtgatgatcggcctgtacggacggggcgaccgccgcaccacggcctggcgcgccacgctttacctggggcttgcctccatggtgctgctggccgccctgctgatgatcggcacgcaggcgggcttcaccttctccggattgaaagacttcatggccggcggccgggaactcgcccacgcggagctcatcggcgccctgctgatcgccgggttcggcacgctgatttccctcttccccttccactcctgggcagcccccgcgtatgcctccgcccccgctccggtggcgatgatgcatgcgggcgtgctcaagaagttcggcctgtacggcctcttcatgttccagccgctgatggaaactggcttccttccctggacgaacatcctccttgtcctgctcgtatgcaacgtcatctgggtaggctacgtgaccgtcaaccagaagaggctggacctgctcctgggcaactcctccgtgatgcacatgggctacattttcctggccttcgccgccctggtggcctccggttccgcggaagccaacccctgggcgctgaaaggggcagccctgcttatgctggcccacggcctgaccatcgccctgctcttcctgctctgcggacagattgaaaagcagaccggcacgctggaaatcaactccctgggcggcctgagcaccaggctgccgcgcatggccttcgtcttcggcctggcgggcatggcctccatcggcctccccggcctcgccaacttcccgggggaattcatggtcttcttctccggcttcgccggatttaacgacagcttcggccctgtccagatcgccaccatcctgtgcctctggggcctggtcatcggcgcggtgtacatgctgagggcctaccgcaacatcttccagggggacctctccaaggccgcagcctacgccacggaactgctgccttccgaacgggcggccaactacttcctgacgatcaccctggcggtcttcggcttcttccccacgctggtgctccagttcttctcctgattccccttccgaatacaatccaagtttaacccgatcttcttttacccatgcaagcgtatattccgggattcatcctggccggcctggcgatgcttatgctcctggccgagaccttctgcaaaaagacgcccaaattcgtcttcgggctgattggcgcggcgggtgccctggcgatgctccccttctacatgggggggctctatgacaatgtctacatcatcctggcgcttgtcgccacggcagtcaccctgctgctgtccgtggacttccgggccgtcatcaacctctcttccaacgactccaagtcccaggacggcacgggggaattctacatccttcccctgctggcctgcgtgggcatcacctccctgtgcaaagcctccaacctggtggaactgttcgtctccctggaagtgcttaccctgagctccttcatcatggtgggctacttccgccggaacctgggctccacggaagcgggcatcaagtacctgattctgggcgccgtcagcacgggcttcctcgtcttcggcctggcctggtacttcggcgtcacgggaaccttcatctatgacggagccatcgtcagccacgcgctggcgggccagacggcccccgccatgtacctggccctcgccatgctgctgctcggcacggccttcaaaatcggcgcggttcccatgcaattgtggattccggacgtataccagggcgcacccactccagtgacggctttcctctccgtggcctccaaggtggccggctttgccctgctcagcatcatcctggcccccttcgccgccctgcctcccgttgaattcgtcatagccctgatggctgcggctacgctgctggtgggcaacctgggcgccattccgcagaccaacctgaagcgcatgatgggttactcctccatcgcccaggccgggttcatcctgcccctcttcatcggcaccgtggacggccggcttgccccgaacgccccgttctacctggccgtgtacctggtcatgaccttcggcgccttcttcgccctcgccatggtccgcatccagcgcgggagcgaggaaatctccgccttccgcggcctgggcaagaccaatccccggctggcgctggccatcaccatcatgttcgcctccctggcgggcgtgccgctgacagccggtttcttcgccaaaatgatctccttcgtgcacgtcatcaacacgggcctgtacctgggctggatgctccccgtcatgatcatctgcgcggcctccggcttctattactacttcaaggtcatccgctccatgtactgggacaagcccgcagaagacgcggaccccgtacaggttcccgtcatttccggagtgatgctggcggccttctccatcttcatcgtgctgggaggcctgatgcccctcttcctgaaccccatccggtagaacgacatttcccgttcatcatcccgaaggccgttcccgcatccgcgcgggacggccttcttcattccggaagcgccgcgggcctttgcggcagttaaaggaatcaatcagccgcattgaacgaaagcaaacaaatggaagaccacatcatgggggcgtccttccggatatgcaattccggttgccgtaaaggcttgcggttctcccccagtttcatgaatttctccggaatgctcatgccgaaaaaatcttgaaaaaagtgcagtttccatgcgagatttcccacagggcaaacgtaattagcccgtactaattatttgctagcctccatccctccggacggagagcggccaaccatcaatcaatcattcaaaaccatgcgtcttttctccgccacagccgtcgtttgcgccgccctgttctccggaaccactctcctgcatgcccaggaagacccggaactgctggcaaaacgccagtgccgttccgtccatgtcatgcagcagggccacccggcccaggcgagcgccctgtacaatgaagtgaaagccaagacatccgttccgggcacctacttctgcgccatgaattttgacgacggctacatcggctttcaggaacagtccaacggtaaaaaagtcatcatcttttccatctgggacccggtggcccatggggacaaccccaacagcgtgccggaagaagagcgcaccaaactggtaaagctgggtgaaaacgcgcgctccggccgcttcggcggcgaaggaacgggcggccagagcttcgtggactatccctggaccgtcggggaaaacatgcgtttcctcgtctgcgtcaaaaagatggggaaattcaaggaaatcagcggctactacttcaacaacaaggacaagtcctgggacctcatttccaaatggaaaacgcattcctcggaaaaggaactttccttctccgtcggattcgtggaagacttcatgcgcaactttgaatccgccaagaaagcccgcggcgccttcttcggccccagcttcgcgtacaaggacggcaaatggcaccccaacaccagcgtgacgttcaccggcgatcccaccccctccaccaacgtcatggcagacatccagcccaacggttccgttctgctccagacgggcggagaaacaaaaatgacggatttcaaactgttccagaaccgtcccctgccccaggatgccaatcctgtccagcctgatgaagtcgtcaccaggctcgttcaggagaacatcaaataatcatgtcccttaccggctggctaaccatgatcgtttccatcggcggcgtattgaccgccgccgcatgggcgtattacaaggtgctctccactcccaaggagacggaacacctgggcagccctacccctcccatgccggaggacccggaggaataaggctccggcccggcgcatgaacaattcccggtccgcggaaactgcccggatttgtcctgcccatccggggattgccgcagctcccccgcggcccccaaggtaaaactgagcgccagcggactttttatcctgaaaaccagtaccccctgccggacgtttttcatttcagctgacgcagggcttgcggcgcttccgcaacgcgtgccagccaaaaacctggaacaggataaatacgccgtccatctgctcaatagccacgcaaacgcacgacgcacgcgccagccatccccagcgcatccacgcatgcagtccgggccgtccgccattcaggcagtatccggttcacggatattccttgaacaattttcccttttaaccgtccgacgggggaaggatgaaacccagccggtcaatgccgtacctggcgcattcctgccacagggatttttccagggcttccgccgtccggcggcgttcctcctccggcatgctttcaaagtactccggccccaggtgttcgctgatggccttgtccgccatgcgcgtcaccaggtccgcccagaaaatgttgtcccggtactcgtccaggcagtcctggaaaaaggcgttttcctcatattcccgggtgaaggcgtacccacccagatcgtccgcgtaggcaatgcggcccttcagtttgggcgtggcggatagttcctccatcagccgggagaccagctttccccatgccaccaggcgtccttccgccccgtcctgctggttggaggcggccaccgtggcggcggtggaaagcatttccgccagatcgcgcgcctcgtcgtcggataatttcaatgtcaccggcatggagtcagatcaatccgagtttcatcctgccttcctcgctgaccatgtcctgattccagggggggtcccacaccatttccacatccgcggcctccacgccttccagcgcttcaatgcggtccttggcctccatcaccagatggggtcccatgccgcagccgggcgccgtaagagtcattttgaccgccacgtgatgcaggccgttttccagctcgatgacggtcacgtcgtaaatcaggcccaggttgacgatatccacggggatttccggatcgtacacgcatttcagcgtatcccatacccgttcttcaagcgtggcgttttcatccagttcagccgcctccggggaggcttccgccgcttccgctcccagggcgtccgcattttccctggagatgcgggccaggccatggtccgtagccacggtataggagccgcccagtatctgggtgatatacacgcgttccccctccggcagcgtgagcacatcccctctggggatctggaccgccgtcacttctcttttgagttctactacctggttcagcataaatccttgcgattaaaggaacatccggctacggacatgcgcgggagggaacaggccccacgaggccggaccgccctgcggcatccggaaccttccgcgcaggagcaacataaggggtatttgcatcaccgtcgaggtcaaaaactgttctgccgtgaccggaaacgcccttcatgacaggaaagcgcatgccgcaatgttttggaaaagccgccggaagcggaaagcttcgttcttgcctagcggcgggaaaaggtgtaaaaggtccgggctgtccaggctgccgtcagtccgggaccggccacacgcgcatcttcaacttaacattccatgttagattacttacgtaaacatacaatcgtcatcatggcagccatggccctggtgtttgtgggcctcatgttcatcggcggggacgtaagcggcggctccctgaccggcatgttcaagcaaaccttcgtttccgtggacggcaagtcttacggagaaaaggattacaacagcatgggcagaaccggcctgtccgtggctttctccttcccttccaccttcggcccgctgctccaggacaatttcagctcggaagaaagcctgcgggaactctgccacctgctgaaaacgaataatcccaacgccgctttcctggcctaccgcggcatcatccgcagggaggcgagccggctgggcctgacgcccaatactacggagattgacgacgccatctgcaacattcccgaattccaggatgagaagggcgtcttcgacccccggaagtacgacaatttcatttccatgcgcggcaacatgggcaagaagcttcaggaggaactgctgcgcggcctgatggaagacaccatcagcctggtgcgcatcaaggacgtgctgaccggcggcatttccgtggaatccggttttgccgaagccgtggcggagtccaacagccagcagatcacggtcaacaccgccttcctggaaaagagcgccttccgtcccaagacggacccgggagaagaggaaatcaaaaccttctgggacaagcacaaggaaaattacaagaacgaggaagcccgcttcttcaccgtgtacaccttcacccccgcgggcgatgcccaggctcccaagcccggcgatatttccaacgccaccatggaaaccatgaacctggtggaaaatgacatctgggaaccgctgaacgccaccaacggcaggaacatggaccaagccatcagtgaagccctggccaagactcccgacgtctgcaagatggagaagaagtcctacacggccgtgacgcgcaagaatgcgccccaggaaatcaaccagccgatcaaccagtccgcctccgacggacgcagcgccaccctgctggacgtggccttctccctgacgggagcccccgccctgaatgcggatgcggacgccaaggccattgaagaagcgcgcgccaagaccggagccgaacagatcagcaccatgcaggtgctggaaaacggacaggtcgtcctggtccgcctggaaggcgttaccccggtaaaggcgctgccttatgaaaccgcccgcaacagcgcccgcgccgacctgctggaaagcatgaccgtggaatccatgaacaaggccgccgccgaactcaacacggaattgcagaaggctgaaaagcccgtggaacagttcaacgccatcgccgggaaggccggagccaagaccgccgcctacggtcccttcatcaatccgaacgccctcctgagcagcgtcaacctccaaaacgccagaagccaggaagaactccaggcccttctggaccgcgccatgaattcccgcctggctccgcccaaggaactcccggtccctgaagaagtattccaggcggtttccgtcattaaccccggccggatggcccagcccatcaacacgggggacggcatcctgctgacccagctcgtcaagcgcgaactggaggatacgccggagttccagatcaaggccacccagcagattgccccggccctgaccgcccaggccaaatccatgatcatgctggactggctgaaagcgtgcatcgcccagtacaaggtggagatcgcccccatcctgaaccaggaacgctaacacccttcctttccatggcagccgtcattacccccgtgtcccgccgcacaggggcggaatgccgccaaaataccttcctatgatggcccccgcaccggggccatcatttttattgcccttgttccgccatccctgacccccttcccccttcatcatccatgagcgccctccccgcccagtccaggtacatcatcggaacggaagcctgcgaacgcttcagcttctacggcatgaagtccatcctcatgctgtacatgacgggccacctgctgatgagcgaaaactgggccaccgccaccctccacgtcttcgcgggaatggtttacctgcttcccctggcgggcgcatggctggcggacaaggtatggggccggtacaagaccattctttacatttccctgctttactgcgtagggcacggagtcctggccatggcggacctcttccataccattgaagcgcgccgttacatcctgatgacgggcctgttcatcatcgcgctgggcgcgggaggcatcaagccctgcgtctccgccttcatgggggaccagattccggacaaatccccgcagttgatgaccaaggccttcaatgccttttactgggctatcaacctgggctccttcttctccttcctggtcattccggccatggaacagcattacgggtacagttgggcgtttgccgttccgggcattttcatgggcatcgccaccttcgtcttctggctgggccgcaagaagtaccacagaacgccgcctgaacgcaacaacggccgcgccggcttctggaaagtgctcttcatcgtcctgttccacgggggctggaagaatgcggagcaacgctgcggagcttccgccgtggaggacgcccggcacatcctgaaaatcctctccatctttgtcttcatcattcccttctggtccatctttgaacagacggcctcctcctgggtggcccagggcagcaggatgattcccctttccatcccgctcccgggcggcggagactggtccatcgggccggcgcaaatccaggcggccaatcccattttcgtgatggtgttcattccactgatcaccgtattcgtctatccgaaggtggtgacgctggcgcggcccctggtgcgccttggaacggggctggccctgagctctgtgacgttcctgattgtcgctttcctgcaatacaggctggagggaggcgcctccatgtccatcgcgtggcaattgatcccctactgcgtgctcaccatttccgagatcctgctcagcaccaccggcctcgaattcgcctacacgcaggctccgctgcatttgaaaagcgtcatcaccagcttctggaacctcaccatctttgcaggcaacatgctggtggccgccatcacctttttcctgtccaacggagaatccgccaacgccatctccacagaccgcttcatcctgtacgccatactcgccgccgtggtggcggtagcctattccttccgggcgcgcaggtacggaaagacggagtagaggaagcatccccgacgcgcgggaatgacgttttttccggctccggagaacagcagacataataatgtcttgaaaaagacagccggaccgtgcgaaattccggcacggcccgcacatcctgtccgcgggcatactttcgggaaagtattggaaatacaaattacagagaagatatgaggcgaacggggatttacccctgttccccgccgcaccggaaaagttgcttctgaaacaatcttatcggcagcgcatttccagtccggcacaagacgatatatctttgcttcatgtttaatacttcatttaaatcggcctcggccttgtaaacaaccggtactttccgtagcggttgtccccttttgtttgctcccggattatcccttccgggaggaagttccgtattattggaatttcaacgttaatctatctgccacgatgacggcgccgctgtgccgtgccctcatggcatacaacatttactaaattaatgagtaataaaaacaaaacaattcacgaattcgatttcaatttcatctgcgaatatttctcgcgcctggaacggcagggccccggcagcccggaggctaccctcaaggccctcggcttcattgacaatctgaccggacaatcccgcatcgccgacctcggctgcggcacgggcggacagaccaggacgcttgccgcacatgttcagggaagcgttacggggcttgacctgttcccggatttcatccgcatcttcaaccgccaggcaacacagtcaggcttgcaggacagggtagaaggcatcgtcggttccatggacaagctcccttttgcagaagaagaactggacctgatctggtcggaaggggccatttacaatatcggctttgaacgggggctgaacgaatggcgcaagttcctgaaaccgggaggctacctggccatttccgaaagctcgtggtttaccgcggaacgtccggaagagattcaccgcttctggatggacatgtatccggagatagacaccatacccaacaagatagcccagatacagagggccgggtacgtgcctgtcgcttccttcattctgccggaaagctgctggacggagcattattacgctccgcaggttcccgtgcaggaaatgttccttcatcaatatccgggaaatgaagccgccgcggaattagtcgcatccctgcgccatgaagaggaattataccgcaggtacaaggaattctacggctacgtgttttacatcgcaaaaaagacggaacaatgattcatttaaatgcttacggctggaatgagaagttaagccggctcaaacgggaatctacgtacagcgccctgccccatggccgcatcgccatcgtgcacaggacgtgttatgagatcgtggcggagaacggagtgttccagtgcgaattaaggggaaacatgatgtatgaaaaaccagcctttgaactgccctgcacgggcgactgggtgattttccagccctttgatgaaacgaaaggaatcatcgtcgatgtgctgccccatgaacggaccctgtaccgcaagaaaagcggaacggtttccgacaggcaggccatcgcctcttacgtggacaaggcattcattgtccagagcctggatgataatttcaatatccgcagagccgagcgtttcatggttcagatattggaagagggaatcaaacccgtactggtgctgaacaaggccgatctagggtttgacaggcagggcattgaagaacaggtcaaacacctggagcgccggatgcctgtattttttacaagcattcatgaaccccagtcgattctacggctgcgggagtccattccggaaggggaaacagtggtgtttgtcggttcctcaggcgtcgggaaaagttccctggtgaatgcgctgtgcggaaaaccggtcctgtccacctcccatataagctcctccacgggcaaaggacggcacacgtccacccgccgggaaatggtattgatggacggttcgggcgttttaatagacactccgggcgtccgggaattcggcctggcgatcggccagcccggttcccttgcagaagcgctggatatttccgacttcgcggcggcatgccgtttcaagaattgcgggcatatccatgagcccggatgcgccgtcctggaagcagtgaacaccggcctgctggaccgcgaggtttatgaaagctatctgaagctccggcgggaagcggaatacttttccgcttcggaacatgataagcgcaaaaagggaaaatccctttccaaactcgtagaggaagtgaagaagcggaattccaaattctaacctgcgttgaaacggtgcgggcattcctgaaacgggaatgcccgcattcttgttttacccgctataacggcctattccgtattccagttaaaccgtggccgcgctcctatcccctgatgtcaatgtccagatgggcgagcagcccttccagcccatgccgggaaaagaccgcctttttcagcttgcacatggcgggattgatcgaaaagttgaaagaggttgaaaaatcggctttctccaaattggttccgacgaaagaaacccgttccaggtcacagcggtcaaaaacggattccgccatgtcggcgtcattgaagtacccctcatacatcttgcagccgcgaaaaacggttttccgcaacctggcttctacaaagctggcataatcaagatgcgagttttcaaagaccaggccgtccgaaaacctgtcgatgtccgtaaagtctgcgccagtcatcttgcagtcggcaaaggcaacatcccggagggctcccttgaagctggccagcgtgaaattgcacgccctgaactcgcacttctcaaaatcggtattccggatgaccagctttgaaaaatcacacgcgacgaatacgcaatcatagtattcatcatccagctccatttcatggaaatccactttctcaaaggtctcgttttcagtcatatcatgttgatgggagttgccgctccgtgtttgcttcaatgttccggaatcaccgttttccgggaagcagaacgcaggagaaaactttccttccatacccgccgaattattctactttccttccctgccttttagcatggaagctggctgtctgcaagccgtcccgcctccgcgcatgctcgcaggcccggctgacgcctgaggaaaaagataaaaccattccggatgctccctgccgccgccaaaaaacgcgttgcccctctccatttgctatctacctgttcccatccgtatagttccaaacgagccaacgctacaccccgaatcctgaatacggcgcccttttccaacatggtttaggcgccttttaaaaaccggatgcctcctcccgccaagccagcctttccggaattttcctccagccgtatatcttcattcaccggctccatgaaccccggtaatcaagatgacacggaaccaaaatatactcgccttctcctcagcccattacgcaggctacgtcatgtgtaccgttcccaatacctatcgggaggagatggaccggcagacgtcccacccctcctgcggcttttacgcagcctcctatgtcctcaattgcttcaatcctgatgccgcatggacgaatatggagcttttaaaattggccgttcaatatcccctcaccaatcgtgcagagggctgtttaagcgaggtaggggaagttttccatccccacgattttgcccgtttcatccatgcgagagccaacggaagctgctccgccgcctgccagttatttcatgaacaaaccatccgggacaccattgatcagggagggtatgccctcgttccttttcaagttatcaatgataagcaaaacgaaaaacacggtttcccccggactggcgtccagtggacggaccttccgcatgcacattggtgcgttattgccggatatgcaacaacggataactccaaactgctcgccaagcactggggagaaaaccggttatttgatatagatgagctcggtaacagcaatcaagggtgttatcccctccagcaaaccaataacatcacagcacagcgcgcctccaaagtgcagttgctgcagaaccaaatcatcaccatcctgcccgcacaagcttcgccaggccgccggagaggctgcgcctgctgacctgcaaggcatcttcatcggtctcccgctctaaaaaagccagcccatggaaacggattttccgtccagtgaagcagggaggcacgcaggcccggatagagggaccgtttcatgaggaaggagccctgggaaacggtcccggtttaaaaaaatgccacggagcctgccttcgtgaacagcgttctggattccagacaagttgccgaagtccatttccggaaaccgtcctccctttttaaggatgtgaatgaagctcaggagatacggcagtcgttgagcaactcgtccatgtagaaggtcatttccgccagggcctcacggtattccgtctggggaaggagccacaggatttcacgggcagcctcgtttttctccagagccacctggatcgacttgtccagggcctccgcaaaaacggggttgtcctgaaaggcggagtaatccaccacttcacggttttcaatggcgtccctgagcgtggcttccacgttcctgtccccgcattccagcaggttgaagatggggagggtcagcttgcccttggtggcgtccgtgtggagcgttttgccggcatcgtcttcatcgcccaccatgtccaggcagtcgtcgtaaatctggtaggctacccccagcaggtctcccagctggtaaagggattcctccacttccggggccactccggagatccacgccgcgccgcccgtagcggcggagaacagggaggcggtttttttccggatgatttcaaagtattcctcgcgggtcatgctcaggtcatacaggcggctggactgggccacttccccctggcatacgtccctgacggtgttcgccagcctgcggcagaattccgtgctgccgaactcggtaccaagcaccatggcatgggaaaagagaacatcccccagcagtacggccaggctgttgccccacagggcgttcgcggtggcctcgtcacggcgcttgtcggcctcgtcaatcacgtcatcatgcacgagggaggccagatgcaccatttccagcagggctcccagccggatgtgggcttccttgatgccgcccgtggcgccggctaccagcagaaccagggccggccggagcattttccccttggactggcacactgtttccaagtagtcggtgacttccgggtcaaaacaggatgcctgggcttccacaaactcagaaacttgcttcaattccggcttgaccagttgaagatagtgcttctgggatcgtaatttcgaaaagaacgggatggacatgatatggacgagggccggcgctggtcagcgccgcaggaattgtggcatatttgaagttctctagcaatgtatttcacaggccatctttgcatggccgggcggcaatgagccaaacccgcgctgccggacgccgggaaccctgcggagataaggctcactttgaccttgagccgggatgttttccttctacactggcctatcatgagagccttggtctatgattgcagcgcgggcatcagcggagacatgaatctggccgccctgattgatttgggcgtggacagggaaagcctggaacgggagctgtccaaattgcacgtgcacggggaatggaaactggaatgccgccgtgcgcagcagtccggcatccagggaacgcggattgacgtactgacggtggaagaaggccattccggccacggccatgcacaccatcaccggaccatggcggatatccgcaggcttattggggcaagcggcctttcagacgccgtaaagcggacggccctttccattttctccctgctggcggaggcggaggcccaggtgcacggcaccacgccggaggaagtccatttccatgaagtgggagcggtggactccatcattgacatcacgggggccgccatctgcctggagctgctccgggcggacgccgtcttcactggaccggtggaactgggctcaggcaccgtgacctgccagcacggaacgatgcccgttccggccccggccacagccctgctggcgagccgcttccagtccaccctgaacggaaccacccatgaggccaccactcccaccggagcagcttatattgccgccctggcgcggcctgtcccggccccgctggcgggccgcatcaccggaaccggctacggcatcggccaccgccaggggctccccctgcctaatatcctccgggtgatgctggtggaaacggaggaacaggagagttccccggaattgctgacggagctgtgcgccaatatagacgacatgacgccggaacagaccgcctacctggcggaaaagctgatggaggccggcgcgctggacgcctggcaggagtccatctgcatgaagaaggggcgcctggcggtcaaagtctgcgccctgtgcctgccggaacaggcggaccgcgtgagggaagcgtttttcctgcacagcagcacgccggggatacgccagcatgatacgtgccgccacatcctgcgccgggagagcgcctccgtatgcactccccacggaacggtgcatgtaaaaacctctttcatgaacggacgcccccatcaccggaaggcggaatttgaagattgcagaaccctggcggaaaacaccggactgccgctggaacagtgccagttgatggggcttttccccaccccctcccatgactcctcctccacagactccgtttgaacggctgcgcgccgtcctgctccccagggagcgcatcgccgtcgccctgtccggcgggctggacagcagcgtgctgctggctgctgctgccaaggttctggggccggaacactgcctggccctgaccgcgcaaactccctatgtaatggaggaggaagtgcgggacagcgcggagctgtgccgccgcctgggcattcgccaggagacactggcgttccccatcctgccttcccttgcggataatccgccactgcgctgctacctgtgcaagcatgccctgttttccgccctggctgccagagccgcggaagcgggctttcccctgctggcagacggctccaacacggatgacctgggcgactaccgccccgggcgcaaagccttgcaggaactcggcattctgagcccctttctggaagccgccatggacaaggcggacatccgcagcgtggcccgcggacttggcctgccggagtccgtcagcggcaagccggcctatgcctgcctgctgacccggctggagcacaaccgccccgtgacggaatccctgctgcggcgcgtggatgcggcggaggccttcctgcgctccctggggctgaaaggctgccgcgtccgggttcacggggacgacctggcccgcattgaactgccggaggaggaacgcggactgttccggagcggggagcttgccgctcccatagcgcaccgcctgcgggagctgggcttccgctacatcaccctggacctggaaggatattccagaggcagcatgaacgaaccatcatgaatgacattaccgccatcctgcatcagcttgaggaaggccgcctttccacggaggaagcggcggaaaaaatccgggccgccactgcgcccgcatcttcccatacggatattgattacggccgcctggagcgcaccggatgcccggaagtgatttacggcgcaggaaaaaccccggaccagattgaagagatagcccgcggcctgcttgccgccggacagaacgtgctggccacgcgcctgaacgtggaggcgctggactacctgaaccgcgcctttccggaggcggacatgcacccggaagcgcgcctcatgcgcatcatggcgaaccccgttccgcagacggagggcttcgtcggcatcgtcagcgcgggcacctcggaccagtccgtagcggaggaagccgccctgacggcggaattcctgggcagccgggtgctccggtaccgggattgcggcgtggcgggcctgcaccgcctggtttcccatctggattccatccgccgggccaccgtgctggtggctgtggcaggcatggaaggagcgcttcccagcgtgctggccgggctggtaaaagcccccgtgatcgccgtacccaccagcgtgggctacggagccaatttccgcggagtaaccacgctgctcgccatgatgaactcctgcgccaacggcgtgtccgtcgtcaatatagacaacggtttcggggccggattcaacgctcatctggtcaacagcctggcgtcccggccccgctgaatgccgcggccgccgcccttccatgacggaaccgccggcatccgccatggacagattcaccgaatgggcgttaaatgtcccggaagcattcctcaccatcccatcatgaccagatttccctttttccatgccctttcctgctccctgctggccctggcctcccaggcgctggggtggcagccctccggagaatccgtccccgccgccccgcaggaattccgcgcggcgtggatttccaccgtccataacattgactggccctcccgttccggcctttccggcgctgcccagcgtgcggagctgctgacgatcctgaatacctgcgctcagttgaagctgaatgccgtctttctccaggtgcgcccgaacgcggacgccctgtaccagtcctccctggagccgtggagccagtggctctccgggcccggcgtcaatccggggtatgaccccctggccttcgccattcaggaggcccaccgccgcggcattgaactgcacgcctggttcaaccccttccgggcaaaggcgaacgtaaagcacgccgtgggccgcaaccatatttccctcacccgtccggacctgatgaagcgcaacggctccgttctgctgatgaatcccagcgcctccgcctcccgcgaccacgcgatgagggtcatcctggacgtcgtgcgccgctacgatattgacggcgtgcacctggacgactatttctacccctaccccacgcccggccgcacctggtcccccgccagcttcagcgacggaaagtcgccctcccagcgccgggcctgcattgacgacttcgtgcatgacatgtacaaatccgtcaaatcctccaaaccctgggtgcgcgtgggcatcagcccgttcggcatctggcgtccgggcgttcccggcggcattgaagcgggagtggacgcttacgagcacctggcctgcgacgcccgcaagtggctttcccgcggatgggtggattacctggccccgcagctttactggcgctgcagcccggccaagcagagctttccggtcctgatgcagtggtgggccgcccagaacacgagccgcccggtgtggcccggcatcgccaccgcgcgcatcatgagcagcgaggacccgggacgccccgcctctgaaatcgccgcgcaggtcaactattcccgctccctggccagaaccgcccccgggcagtgcttctggagcgtcaaatccatcatgcggaatgccggaggcatccagaaatacctgaacaagctgtacccctccatggccgttcctcccgccatgccctggtgcggaagcgggacgcccggacagccgcgggattttcaagtggaggacaacggttccaccgtgaccctttcctggcagccgtccggcaatccctcccggaaatgggccgtccaggcgcgctacggcagccagtgggccacgcgcatccttctgccgggcagccagacccgcgtgacgctgcccaaatccttcctgggggatgccgggtccgtcgccgtcaggggcgtcagcgcctacggagcccagggcccagccgcggcggccagaaggtaggaagctttttccggcagcctccggcgggaaaggaaaaaaatgcccgatgttctaagttttttgaacaactccaaatccatccatgtccaaacttccatgaattcccgtggcgcggacatgaacagaaggcgtttcatcgccctttcctcattggcggcgctgggaacaatcagccaggcccgggcaacagggccgtctatacaaccacagcacaagatgactaaaaagcaagatccctccacggtcggctatgccgacggcaagtacgtgttaccgccccttccgtacgcctacgacgcgcttgaacccatgctggatgaaaaaaccgtgcgcatccaccatgacaagcaccatgcggcctatgtcgccggcgccaacgccgcggctgaaaagctccgtgaaatcgcggacggcaagctggatgcctccgccaccaccaactgggtgcgcaacctgtccttcaatgtttccggccatgtcctccacaccatttactggaccaacatgacgcccgatcccaagaaggaaccgcagggccccctggtggacgccatcaaggaaaaattcggttccctggaagccatgatgaaggaattcaaggccgcctcccagggcgtggaaggttccggctggggcattctgggagtggaccccatgagcaagacgctggtgatctgcggcgcggaaaagcaccagaacctggaaattcccggtctcgtccccatcctcgtctgcgacgtctgggaacacgcctattatctgaagcaccagaacctccgggcggattatattgaagatttctgccgcttcatcaactgggacgacgtggaacgccgctaccaggaagccatggcgtcctgaccggttccggcagacattgatttttctttttcttcaacggcacgggccttctaaggtccgtgccgttttttggcgtacttccacccggctcttgcatccggcggagcaatagggcatactgccgtggactaattatctatcaccacgcgcatgaaaaaagttttcgtttcaggctgctatgacatcgttcacgccggtcacatccagttttttgaagaagcccgggccctgggcgactatctgatcgtctcctttgcctcggaacccgtgctgtggcaccacaagcagcgcaaaccgtccattccggacgaacacaagaaagtgctgctggaaagcctgcgcatggtggacaaggtcattctgggcaccggcatgaagaagggcctggactttgaagaggaatttcttcaggaaaggcccgacgtcctggccgtgacggaggacgacctttacagcggcatcaagaaggagctgtgctcccgtgtgggcgcgagttatgtggtgcttcccaagacgcctcccaaattcgcccccgtttccaccaccatgctggtgaaccggatcaaggccccgtccaccgtgccgctccgcgtggactttgccggaggatggctggacgttccccgctacgccagaaaaggctcctatgtggtcaactgcgccatcacccccatggtgtccctctgcgaatggccgtatgaaaagcggtccggactgggcggcagcggcgcgtgggccatgctggaaggacgcgacccggtcgcttccgaactcgctctgggcgtcggctggcaggaccccgccgtcattgcggaaacggggctgtgcgtctggcgttccggcagttcccccgtgctggacgtcaagggcacgggcgacttcctggaaggaagaatggccattctgtacacgggggaggaacacgacactcccagaatggcggacgaacagcgcgattacgtgcgcatctcccaatcctccctcattgcccgcaccggcgtgctggaacgcaacatcaataccctggccgctggcgtggccctgtattacagcgttcagcttgacgaaggaatgcagcccctgccggacatcccgaacgcccttgccaaaaaatacctgggcggcggctacggagggtacgccctgtatctcttcccctgccgggacgaccgcgaccaggccgtcaaggacaatccggccatgaagcgcgtggaaccgtactgccgccaactgttcaagtaagcccttctctttcatgtccctgatgcggaacagcctggtagcctccggcgccattttcgcctgccgcctgacaggcatggccagggaaatcgtgtacacttccctgttcggcgctacgggagtgctggatgccttttatacggccttccgaatccccaacctgttgagggacctgtttgcggaaggggctctctcccagtcctacaccagcgtagcctccaaaacacgggaggcggaaggcgacgcggccgcctgggagctgaccaacaaggtagccacccagctttccacgctgatggtcgccatcgtgacgctgggaattctttttgccggccccgtcatggaggccctgtacagcggggaccattccctgacggaccagttgttcgccacggacctgagccgcatcatgtggccattcatcggcttcgcctccctgtccgccctcgtcatgggggcgctgaacatggtgggggtctttgggctgcccatgctggcttccgccgcctttaacgtcacctccatcctgttcggcctgctgatcgggtacttcattgacccctccttcggcccgaaggccctgtacggttttgcctgcggcgtcacgatcggaggggcggcccagattgccgtgcagctccccaagctccgtaaaaccggcttccggtggaagcccaatttccattgggacgatccccgcgtgcgtaaaatctgggggctgatgctcccgtccgtgctcgcttccggtgtcacgcagtttaccatcttcatcaatacgggcttcgccctggacctccagaaaggctccgtcacggccctgaccacggcgttccgcctctggcagcttcccgtgggcctcttcggcgtggctacgggcatggtggtcctccccgcggtttcccgcatgatggtgggggacggcagaaaggaagtggccgtccacattgccaaggggctgcggctggtggcgttttttgcggttcccgccttcctgatcctcttcatcctgggaacggaattcgtctcctccgtgtaccagtggggccgcttcaaccaggacgccgtgcgctacaccggggaggtgctgggcgcctactccctgggcctgctgggctatgccggaaccaaggtggtccagcccgtcttcctggccctggaaaaacgctgggtccccctgattgccgccgccgtggcgctggccatcagcataggcctcaactactactttgtctacggcctgcataaaaacgcggcgtggctggcgctgaccacctccgtggtcaccaccttcaacttcctcttctacttcctttacctgcgccgccagctgggcggcgtggacggacggacgctggtttccggcctgggccgcatcctggcggcgggagccctgctgggggccgtatgctgggcgggtaaaacgtggttcctccagggctttctggactggtccttcccggccaggctcctgggcatctccctggtctgcggctgcgccggaattgtttacctggcggcggccttcctgttcaagacgccggaactggacgcggtacgggccaaattcatgaaacgctgacattgaaacttcccttccgcgaggggaggcgcgctctccgcaagaaaaagaatggtcttcacaagcattctccttgccaggggtgcgctcagtgagtaaagtttttccgcctgtgcggggaatagcctgttttccgccagggcatcaaaattctacgatcgcaccacaacaatggacatgatttcccccagcattgctgcattgaccccttccctgaccctcaaggtgaccaaccgggccaaggctatgaaggccgccggtgaagaagtttacggtttggcaggcggtgaaccggaaatggacacccctgaaaacatcaagcaggcagccatcacggccctgaacaacggagctaccaagtacactccttccgccggtctgcccgcactccgccaggccattgccgacaagctcaagagggaaaacaatctggaatatgatcccagccagatcaccgtgggcgccggcgccaagcacgcctgcttcaacgccatcatggcgaccgtctccgagggggacgaagtcatcatcccctccccgtactgggtcagctatccggaaatggtccgcatgtgcggcggcattcccgtcatcgtggaaaccacgccggaaaacggctggaagctcactgcggaacagtttgaggaagccatgaccccccgcaccaagatggtcatcctcaccacgccgaacaacccgaccggagccgtttattcagaagaagaactgcgcgccctgggagaagtggccctgagcgaagacatcctcatcctggctgacgaaatctacgaacacctcgtgtacggagacaccaggcacgtcagcatcgcctccctcagccctgagttgtacgacctgaccatcaccatcaacggcttctccaagggctatgccatgaccggctggcgcatgggctactccgcagctccggcccccattgccaaggccatccagatgattcaggaccacaccacctccaacgtctgcaccttcgcgcagtacggcggcattgaggccctcacgggagaccagagcttcatcagcgacatgcgtgacgaatacgacatgcgccgccagtacgtcctctcccgcctcaacgccatcccgaacgtcagcgttgtggaaccgcagggagccttctacttctttgtggacaccagcaagctggggctcacctccctgaacctgtgcgacaagcttctggaacgctacaaggtggcggccgtccccggcatcgccttcggcaatgacaaggccatccgcatcagctactgcaccacgctggacattctgaaagaagcgctggaccgctttgaagaattctgcaaggcgcactaagcgtcaaatactgatttttccaatcttcaggaccgcttcattcatgaagcggtccttttttattcctcatgagaagactttccggcaggaccggcagaaacaaaacacccggcaagagtgaacttgccgggtggaggaagagatatgaattccttcgtgcctaaaaactccgcgtataccccaaattgatcgtccagggacgatcgtatttgtctccgtagacatattcgtagtccaggtgcacctgatcgcgggcgctgagctgccatgctacgccgcagccaaccatgccgcgggttccatccgtattcggacgccactgattgccggcggcctttacttcaccgccattgcttgcctgctgcgtaacaccggttttcacgtagccctgcaccagctgcctgcctccgttgacgctccatgtgcgtccggctcgcaggcgtccggcaaattgccagatgtcggctgcgcttcccgccacttccaggccctggttcgtgacgatatgcgtggaaccggaatgaagccatgcgatttgcacggagggttccaggaaccatcctccggcgctgctccactgccgcccggcttccatgctcattcccaatccccagttgtcatagctgccccgttccgtgcccccgggctggaccgcggtccatgcggcattgtagctcattcccttgagaaccgcgtccgcaaaccaccccctgctgtgcagccatgaggcgtaaaggcctccgtaaccgctgtccgtgctgcccttgcttccccagccgtcatggaagcggcggtcactccggcgatatcctccgaagaggccggcagccagcatgctgtttctcccggatgcaacaatccagtccgcgccgctgtctgccccatactggtattccgtaaagccgcatactccggcgatgcccaggtccgtgtccgtgcgtccggaagccgtgcgcgcccagtagtgccccctgggcgcctctccggcgttcctggcctgttggtcctgctgcctgtaaaagtccgctcccatgcgcagctctcccatgcgtttggagagggtgtcaagctgttcaaaccatcccgtactcatgcagccaagcacattgagcagtacgccgcccaggttgttgtagccctccggcgacaggtcgtatccattacctgcggcgttgagtttaaggccgtaggagtaaaaacccgcatcaagcgttccggtaaagagcgttgccgcattactgtcttccgccagactgtcccatgtgatcatgtcgtgtatgaaggacggggaggagggaatgccgccttgcaggatgaaatgaaccgtgtgcgtgccggaagcctccccggcgatggcgatgcggtcgcttgttccggcggccaggttgatgttcattgtaaaggcctgcgatccggagagggagccgagcttcaatgtgtcacggccgcttccttcaaaggctacatgccctccgtcgcccttcaggcctcctgaaaactggaagtcctgccctgtgcccgttgtattggccaataggagcgttccggtgttggcaagggccgattccacctgcgcgctggtgaagacatacatggcgcccgtgttggagaatgcctggccgcccttgagcaagccttgcagaataaaccctttgctgttggtttgcgtagtggcggccgtgtcaaatgttgcaccttccttgacctccaggattccggcgctgaagaggttgtccgctccggcagtgaccaggccggagttgatgagggttccccccgtgtggttcgcagcggaggtgatggtgatgccggccgcatcgctgttcagctgcagcgcgccgccgcctgtaatccgggcaacgagcgtccggtcgctgtccggatcggccggagcgtccagaacccaggttttcccatcatggatgttcaattccttgagtccgtaggtgaggtggatccccgtctggccgctgtgctcattggtgccggctacggcaatatagctgtaggtcgcggtaacggtatcctggtaggtaacttcgcgttcctcgccgccggtgatggcctcgcccgtatcagcatccaccaagtccagaagagttgtattcgcgacgtttccggcttgtaccaccagcagggcgtccgcattgatggtgccgtccagagccagttcctgaagatcgcggtccaggaagcccggttgaggagctatgtggtccagactgtctttcagaccggagacggccagcgtggatgccgacgtgatgtcaagactgccggagacggagagctggtgttccagccgggaagcgtcaccgtccacctggacggtaagcgttcctccggccagatgcagcttgctgatggaaaaattttccgtgacggagagttcggagccgcttccgagccgcagggttgcggtgccgagcacggtttgtcctgtggcgtccggacggagccgggtatcagtcagggcgatggttccgccaaatccggccagcgaatccgggagggttacggtgcctgcggaccggatgtccagtgtgccggaacctgtgatgtacgcgcctgagccggtccgaatctgttccatgtcgttaatcaggatgctgccttcgttgagcgcaactccgttcgtgaacagattggttccggtattcctcaggtcaagggctccctgtccggttttgagcattgcgtcggaggctgtgacgtttccgttcagcaggagcgtgccttcggtgtctaccgtgccgttgaggacgatcgaggcggcgttgatctcactgacggcgcctttgcttcgaagagtggctccggcattaagcgtaaaggatgttcccgtatccgtcatgctccccgtgcgcccgaaaacgactccgtccctgagttccagcgtgcctccgtataccgtggtctttccccggaagttgttgtaacggctggcaaccagatgggcgtccgtaccctgatagcgtgttccgctgaagacgaccgtgccggaagtgtcgtgatcagtcccattgtcatccgtataccggttgatcgcgagcgttattgcgtagtccgttcctgaggtgatcgggtcgtcaaactggatgttccgtccttccccggcagccaactgcaaggagcctaacctttcaacatggatggcgttggctgttcccccgtctacggtaaacgttccgttatcgttgcgcgtgaaggttccccctgtcatattgccgctgaaaagaacgtcgtgggtctgcgccaggaattgctgggcggcgttggtgccgaaattgttgatcaggatggctccccctgccgtgggcgcgtaattgttcgtgaaattcgccccgtcctgaatggtcagctgctgattcttcaggtaaatcgccccgccgctgccggaagacgcctgaatgtaatttccgatgaaggaaacgttggctcccagcgtgcagctcccccctgaagacatccagatggcacctccgtcaccggatgatgcggagatgtagttgcccgtgaagcttgcacccgccccaacagtgagggacgcaggccctccatttgcccgcaccgcaaccgccccgccggctccttttcccgttccggcggccaggatgtaattcccggtgaagacggctctgtctcccagcgtgacggaggcgtctccgatcgtgatgtaggtgctgatcgctccgccttcactggctgctccgtctgccgaggtggaaatatggttgccgctgaaagtcgcgcggtctcccagagtaatggaggtggcgtttctatcggcgcctatcgctcctccgtagctggacttgccagcctggacatagttgtccgtgaacgtggcgtcatcacctatttcaatggaggaggaaccgcccttggtaaacattgcgccacccccgccgcctgctttgtctgacgccaaaacatagttggcatggaaaacggcgccgatgcccagagtgatccgggcatcgttggagaacgccagaactgcgcctcctctaacctctccgcttgcggaagacgcgtaatttccgatgaaaacggcattgtcatccagcgagactgaagcgagaccttgaccctgaatggcaatcgcgccgccgcccggagcggtggaatcatcatagattcccgtattgttgcggaacgtgactgctccggtaagattcagagtggcattgctgccgaatccctccacacgcaggacccggttgcccgcattctcccagatgatggaattcatgtcagcgccatggtctcctttcttcaggaaaaacatgggagttgtccccagcccagccagatccagcgtgcgcgctgccgccgtgttgtcagactgaacgttaatgagaagattcaggcctccggtcagcgtggagtcgtcgttatgcaggactaccgtgtcgttggcacgcagcaaaccggacgccctcaattcttccaatgtgccgtacaggttgctgcccggcatggtggactgggtgttgttcacagtgtagtccgcaccggatgcggccggaaaggtgccgatgaacaggccggcaagcacgtagcggagcaaaggggaaggaagatgtagtctcatggtattgaatggatttggaagcgaattaatctatttggagcaattttcagaagttatacgcctgaaaggctatattaggctatgactggggaatcggcagctgcacgcggcgaggaagtagtcatggaggatgaatattcttcaggaaggggaactgcatgcgcagcaaaacaggataagtttagcaggagataaaatcttgacgctgaatggttcatggatataaatgtcatgttttccagtagggaatgaatgcaaattagcggatttccaatccggagacagggcccatgcgccaacagcctgaaaggaggctccatccctggaacgggaaataatatcagtgcaactaacctataacattttgacgacaagctttttggttccttgaaaaatcctgatggcaacaggaagaatagaaaaattcccatctgtttctttcccggatgcacgtcttccgtccattcaaattttctgtctatggtccaaataattttgtattaaatgctttttttcaaatttatagcttgtctccggattggaaatccgattttgatacaaataattgattgtgagattcatagaaatcgcttcaacactgaggcagaaagaaacaatgaaaatgaaagcaaaagggaaaaaaggacttacagcgcaaacccggcggccgcgccatagccccaagcgtaaaatcaacgaagaactcatcaaactggttatggagctccgaaaggttcgcaacattggaatccggctgctcaatgtgaacttcttttgaagcaggggaagaaaagtcattccccattcagcctattcagacagaccgttctttgcagaaccggagcttccctggctcaaaaaactgatggattgaaggacaaattatcccgttctaccagaatgcagacaagatacggaaagaagccggacgtgctgaaggaagcgctggaccgcttcgaataattctgcaaggcgcactaatcgccgactcagctacttctcactttccagggaccgcctcattcatggagcggtcctttttattgaggagtgaaaagacaattccacctctatgaacttcaaacacagtatctaacatattgttggcttcattgacatttgaatgcataaaaggctatcataagtaccgtttccgttaatcctgcatctgcatgaactctccctctttcagcgctctctcttccgtcctcctgctgtattccctggctgcactgccccatgcagaagatgttccaactacggacgaccgctccctctacatcgaatcggaaacggaagttgcctcccctcaatgcctcctggacaagggagaccaggatgaggacaaaaaacgcacggaggtgggtatcggggaagtggtcatcttgactttaaacggaaagcgattacggggggtggacctggactctcttgaatggtccctggagccggagaaggcggccgccattgaaaaatcggaccaggaaaaaaatcaggctacactgacaatcaatagcgacctcactcaggacaccacgctgaaggttcgggtcaaaaccagccttgacgacgaattgccggaaagagaccccttcattttcagcattctcgttccttccggcattaaggcggaacattccgggaaacgagtggaaaagcacccccaggacaaggagaaagacagaccgggagcttcctccaagcttgtcatgacctttcatcccctggctgtcagcttcagcaacatttccatcatggaacgggcggaagacccggaaggattcacccccgtgcatatcccgggaaagctgcggataaggcccaacgctctcaacattcaccgtcatgacaacatcggctggagatgggacaaggagcaggagattcgcttaaggcatttgcagaacatgacgcttcccgattccttttcatggacctgcggatggtacgtacgcgccgacggcaaggactgctgcaagattggcaatgacacgtacggccaggatttcagttttgagtacgaagatgaaagggaaaccaataaagactcccccaccaggggcttgaaaaacatcaaggtaagcatcaccaaattcggatgcaccgtcacgcgcagcacagcagacgacgccctgcatgccgactctaccgccaatccataacctcctgattgcagcatcatgaataaatcttatccactccttctgttattcgtctttttctcgctgtcttttccctgtgcagcctctccggagcagggcgggctccccctcccctccgctatcaggaatctgaacaaacagaacccggaactcctgcggctcaagaaactgctggccagcggccaggtcatcctgttctaccagggggccgacaaaatgcggaaagaagccagacgctaccggaaaaagggcgttacgcctcaggagctgacggacgggctttttctgtgctacctgattgccacggcaccgttcattgacctcaatgattacaacaatgtcgaatgggtttccgaatatactgatgtggatcacaccgtcaaagaattcatgtccaacaccatcccgttcatcgcgctgacggacaaaaacagcaagctcccgaacaaggaagaagccctgcggttttatttaagcgccactgctctggtaattaaacaattccacaggcaggtggattacgcttttgacgctacggagatttgcgcctgcatgctcattgattacgcctccaacatgtccgacgagcaggaaacgaagctgttcaacaagacaagtgcaataagtgcaagaagcaaccatgctcgagccgttatcaaaagaagagaacgcggattcattagggaactgatggcatgctttccgaccaaggcccaggaggtcaaaaaatacctgcatttggccggatacggagacaaggatattccggctctgctggagaggactgtcggtagggcgccggaagccgcctacctgtacaagggcttgcctaaacgaagggattaagatgcctcttgcgcatgatcccgacgactttccgattctcataccgcaaaaaaacttttcgccttgaggaatttctatcggaataccaaaagcatgagccgctgaaataagttattttccattccacaaggagctcctcattcacagagcggtccttttattcttcgggggaaggctcgccgtccccctgtgacacccggcaccagaatcccccgtccagctccggcatcaaaggcttatagccgtgctgccgcagaaaagaatcatcatcccgtgaactggtgtggatgatgtccggtatgccctgctcaatgtaatcatactgctccctgaccatttcctccgacgggaagttttgaaggaaccagtatcttccgcacggcttccagtcccaggtaatgccgaagcccctgtccagccagcccagatacaggacggaggcttcggaaaaagaggccagccgttcccggacggcgggggaataaaactccctgccattccagacaaagtctcctttccggacggcgcccgtcagcccggcagccactccggcccccgtgaggcaggcgattgccagcgttgcggccgccatccgcggcatgcacagggaaaagcgccgttccgcccgggccacaaagaagatagtcacccagatcatcatgggtgaaaggatggaattgtaatagtagttgtacacgctgaacatctccaccttgaagaagatatacagcagggccgtaaagaggagcgccttttgcgtttttaattgacgccagcccgctatcgccagagcccagatgacggccacccacatcagtacgtcggacaggcagcggaccggagccggcctgagcagcctggcccaccatgtggtatcctgggacaccgttccataacgcacggagcacaacaggtactcattcatcgcttctttccaaacaccgttggataccagccaggccgaacaggggacaaccacggccaggaagccggctagcgccacccctaaagccaccgccgcttcttttctccgcccgttccaccacagccacaggcacagaaccccgcctaaagcgcacacgggaaaggctatggagaacttcatcatggaggctgccccggcaaataccccggccgtgccgaacagaaacagcaggctgcgcctgtcccgcatccggaaataccggaccagcccgtaaaccacggccgccatccccggccagcacaattcctccacccctcccccgcgctggaagggaaacgaatcaaacagaaacaggcacaacagcatggaagccagcaggctgccgcgttgtgacagataaaaacgcgccgtcccgcaagccagcagaagcgtcgtaaaaagggttacgcactgaatgaggaatattccggcaaatgaatgcccgtcaatccacgcggcggcataataaatccaaaccagcaggggccccttgctgtccgccatttccacataggggagaagcccgtgaagcagcccccgcccgaacatgaaaaaaatggaagggtccggagatggataaaaggagtacaagggagaggtatccgaacacgctccaatcacgataacggaccagataagaagcgtcagcgggattttccaccccagcatagccatggaatcatttttccctgtcataggttgggtagcaacaagtgggattgtgcggattacaaatccgaactagataggcaacaatgcgaatgtaagaagaatattcatcatattcaagcatatatgacaatttctaacaaatattcttcttgttaagaatatccggggaaataatgggtagagttggagaaatgcatttgatatgaaaaagtagtattgacttcggatttgtaatccgcaacaggccgtgacacggaaatgtacgccatgcctcgcaaccgggttgccctgtccggaaaggcatgattaaatgaaccttatatgaatacccccgttctcaatgacaacctgcgcgccgccacggaagccctttgcaacctgcttgccaaggaagaccaggttgtggcctccaaggcaaaaatcggcctctttttccagaatccggaggcaaccaagctttttgaagaagtaaacgcctacggagaagaactgcgcaacaagcacctggccggcatgccccccacggaagaggaaatctccaagttcgataccctgcgtgaaaacgtggtcaagaacgatgccgcccgcggcttcctggaagcccgccagaccatcgatgaactcctgaacaccatcaatcattatctgggcatgtccatcgaccttggccgtgcgcccactccggaagaaatcgaggaagcccggcagcgcgccatgagcgcccagacttcctgctcctgtggcggcagctgcgacaaggaaagctgcgattgcgacggcaattgcgaccacgaccacgatcacaaggacgggggctgcggctgcggcaaccactaaaagcgatctttcaacctttcgtcaaacggcttcactcccaggtgaagccgtttttcattgacggcatgcgtcaacgccgcccttccaggacatgtacgtatccagtccggcacacgccctggcctgaaaaccgtcaggggcttcacaagcctttgcggcaaccggaaaaactgagcgccagcgaaccaatatcaaaaattgcggcccatgaccgcatattctctcagatgccgcagaagcctgcggcgttccataaaggctttttcaaaagagggccgcatttgcacgccgcctgcattttccccaccccgctttcttcatcaggacgggcaagacgcttgaacgggagatgggcccatgttagcctcattctaaggaatcatgactttttccaaccgcccagcttccgcttccctgccgtttatcaaaacggatttcccgttgttcctggctccgatggccggagtaacggaccccattttccgcaccatctgcaaggaactgggggttgacgtcatggtgacggagttcgtctctgcggaaggcattctccaggcatgggagagaaaccggaggtacacgaagatagaagacgcgcaccgccccataggcattcagcttttcggcgcggacgggaaccacatgggagaggccgccagaataatcctggaccatgagaaaccggatttcatcgatatcaacttcggctgtccggtccccaaagtggtgggcaaaaatggagggtcctccctgctgaaagaccttcccctgctggcctccgtggccggaggcgtggtgaaagccgtgggcgaccgcatccccgtcacggccaaaatacgcattggctgggatttccagagcctgtgcgccatggacgcgtgccgcctgctggaggatgaagggatttccatgattaccattcacgggcgtacccgttcccagcagtattccggcacggccaactgggacatcattgacgaatgcgcacggaccatgtccgtgccggtcatcgggaacggggatatttccaccccgcaggcggtagcgtacgtgaaggaaaacacagccgtcagcggcgtcatgatcggccgggcggccatggagaatccatggattttcggagacgccaaatattatctgctgcacggagccatgcctccggccagggatccgcaggaaaagacggacctgatcctgcgtcatgcccggatggccctggagtcccgccattacggggacgaactccacaccatgcgccacatgaggtcccgcattctggcttacacgaaggggtttccgggagccaaggaaatgcgctcccgcctagctcgcgtctccagcatggcggagctggaagacctgctttccacccttccccgccggcgctcctgagagcgggaaaaatcccgccctccgggagattccgcaggcccggcaagcggcatgggaggaaggccgtcttccccttccccctccgcacctgaaaaaaaatgcccttttgagggaagctaagttgactttacgcctcgaacctgtcagaaataggggagtatcctgccgtcccgtttcggcagacttccaaccatagactccagagatcgacgtgtactccaacgaatcatatctcatcgaacttcttacgcaggccggctatctgaatgaagagattcttcaatacgcgcgcagtcaaaaatctcccacccaggacctggtcgatttcctgatccaggccaattatcttacagaagacgtcatcgcgcaagtggcggcttccacatccctgctgcccgtcgtggacctgggctccatgcacattccccaggaggtgcgcgaactcatcacgccggagctcgccaggcgcttccgggccatccccatttccgacgacggcttttccgtcaacatcgccattgacgacccgctgaatctggaaaccatggacagcctgccccaactgatgggacgcgacgtgattttcagcgtcgccacccacagcgcggtggaaagccgcctgaaagaattttaccgtgacctgaccgttccggcagacgccgccggcctggatggggacgacggagacgcgcccatcatccgcctggtgcagcagatgctgacggacgccttcaagatgcgggcgtccgacattcacattgagcccatggaaaaccggctccgcatccgctaccgcgtggacggcaagctggtggaggtggccactcatcccaagaagctgctcagccccatcatcgcgcgcctcaaagtgatgagcaccaccatgagcatcgcggaaaagcgcatgccccaggacggccgaatccagatgaacatcggcggcaagcagattgacctccgcgtgtcttccgtgcccagcaaccatggggaaagcatcgtcatgcgtattctggacaagtcagccctggtgctgggcctcccccagctcgggttcttctcggatgacgaagccgtgttcgaccgcctcatcactcttccggacggcatcatcctggtaacgggccccaccggttccggtaagaccaccaccctttacgcgtgcttgaaccacatcaaccgcccggataaaaagatcatcacggtggaagaccccgtggaatacgaactttccggcatcaaccaggtgatggtaaaggcggacatcggcatgacctttgccgccgccctgcgcgccatgctccgccaggcccccaacatcatcatgatcggggaaattcgagacatggagacggccagcatcgccatcaacgcctccctgacgggtcacctggtattttccaccctccacaccaatgacgcccccagcgccgtggcccgtctggcggacatcggcatcaaacgcttcctgatcgcctcttctgtccgggccatcatggcccagcgtcttgtccgcaagctgtgcgaccgctgcaaggtggacggcgtgctgacggaaaagcaggcgcatacgctgaacattgacatgtcccgtctcactccgggccagatcaaggccccccacggctgcgacttctgccgcggcggcgggttcaagggccggatgggcctgtttgaaattttcgagatcgacgacgaagtgcgacgcatgatcaacgagaacctgacctccccccagctgcgccagcgcgcccgggaactgggcatgagaaccctgagagaggacggcgtgcgcaaggtgctggccggcctcacctctccggaagaagtgctgaacgtcaccatgggagacgccaactgattttcccccgcaattcattctgattattatggacaccaatcttacactggaactttttatcggccggggaatgatcgacaaatccctggcgaaggacatcaaggaggaaatgaccgtctccggcaaggagctgccggaagtgctggcagacttcggcatcatcggcagcaaggacgatatctggcagatgatcgccagcgacctggggacggaattcattacgctggacaacttccagccggacccgaacgtgcagaacatgatgccggccacgctcgtgcgcctgcacggcgccctgcccgtgcggcacggcccggaaggcctgtacgtctgcctggtggaccccctgaatccgcagacggtggaggacctgcgcttcgccctcggccaagacatccacgtcctcatcgctccggattaccagatttccgaacgcatcaacgaactgtacggcggggaatccgccgccatgacggacctgatgcaggagctcaacaacatgcaggtcaacaatgaaacggaagattccgccgccgcgcccgtcattcgctttgtggacctggtcatcacgcaggccattaaggaaaaagcatccgacattcactttgaaccctttgaaaaggaattcaaaatccgctaccgcgtggacggctccctttatgaaatgcagccgccgcccgttcacctgtccgtcccggttatttcccgcgtcaaggtcatggcgaacatgaacatcgcggaacgccgcgttccgcaggacggccgaatcgtcaagcagatagggaaccgggcggtggacatgcgtgtttcctccctgcccacccagtacggtgaatccgtggtgctccgcgtgctggaccgctcttccgtcaacctgaacctggacaacctggggctccccccgcatattcatgaatatattctggatacggtccacaaacccaacggcattttcatcgtcaccggtcccaccggcgccggcaagaccaccacgctgtatgccgccctgcgggaaatcaataccattgattccaaggtgctgacggcggaggaccccgtggaatacgacatcgacggcattatccagatcccgatcaatgaagctattggcctggatttcccgatggtgctccgcgccttcctgcgacaggacccggaccgcattctggtgggggaaatgcgagacatggcgaccgcccagatcgccatccaggcatccctgacgggccacctggtgctctccaccctgcacacgaacgactccgccggcgccattacgcgactggtggacatgggctgcgaacctttcctggtggcagcctccctggaaggggtgctggcccagcgcctggtgcgcaccatctgcccggactgccgcacgccgtatgaaccctcctccaccatcctctcccagcttggcgtgtctccctatgaactgggagacaagcatttcttcacgggccgcggttgcgacaaatgctccaactccggctacaagggccgcaaggggatctacgagcttctggatatcaacgataccctgcgggacatgattacggaccgcgcgccctccgtggtgctgaagcagaaggccattgaaatgggcatgtccaccctgcgtgaagacggcctgagaaacatttacgacggcaataccaccattgaagaagtgctgaagtatacttaatggacagccggataccgcacccaccatttcaaccaccaagcagaaaacacttaaaacaccacatatatgcctaaatatcaatatacagcacttgaccataaaggcgaccagaaaacgggtaccctggaggccaattccgaagcggaggccatggaatccatccgggcgcatggcctgtaccccacccagatcgtagaagcgggaaaaggcaagattcagcaaacgcccgccgccaagaagaaggccaagggaggcaagaagcaaaaaggcaggctgggcggcagaatcaaggccaaggccctgatgattttcacccgccagctcgccaccctgattgacgcagggcttcccctgctccagagcttgaacgtgctggccaagcaggaggcgaaccccaacctgcgcgtgaccattgaagccctgggcgattccgtgcagggcggctccaccttctccgaagccctggcccagcatcccaaaatctttgaccgcctgttcgtgaacatggtgaaggccggtgaactcggcggtgtgctggaagtcgtgctgaaccgcctggcggaataccaggaaaaggcgcagaaactgaagagcaaggtgatctccgccatggtgtacccctccatcgtgctgttcattgcggtgggcatcgtgatcttcctgatgctggtcatcgtccccaaattcaaggcgatgttcgcggaacagaaccaggagcttcccgccatttccgaattcgtgttcggcatcagtgactggttcatggccgcgccattattcgtgcccaacgccgtcattctggccgccgtcgtcgccatcctgtacgctatcttcacggccatgagcaagacgcccaacggccgccgcaagattgactccgccctgctgaccatgccggtcatcggcaacgtgcagagcaagagcgccatcgcccgcttcgcccgtaccttcggcacgctggtgacctccggcgttcccatcctccaggcgcttaccatcaccaaggataccgccggcaacatgatcgtgggagacgccatcggcctcatccatgattccgtgaaggaaggtgaatccgtggtaacgcccatgtcttcctccaagctcttcccgcccatggtgatctccatggtggacgtgggtgaagaaaccggccagcttccggacatgctcctcaagatcgcggacgtgtacgatgatgaagtggacaatgccgtgggagccatgacctccatgctggaacccatcatgatcgtattcctggccgtggtcgtgggcggcatcgtgttcgccatgttcctgcccctactgcaggtcattgaaaaaatgggttaacctccctacgcagaaccagatgaagattcgatccgcatacagccgcctccgggcggcaaagggcttcaccctcatggaaatcctggtggtgatggtcatcatcgtggtgctggccacgctgaccatctccatctacacctggcttgaaaccagaaagaacgagcaggccacggaatccatcgtccgcaagattgaaatggggctggaaagctaccacagcgaccatgaccgctacccctacggtacggaagcccctttcaacaatcacggcgtggccgtggcaaacggtgaggaatacagctccaacgtcgtttacatggccctgttcggggaccacaagaatgaaggcgtgcccggcagggataccaccatttacaatgacgaactgaaccccgccacccagcccaagagcaacccgaccgtccgggaagtccacgtgaaaagcaaggacgggaggccggtcaccctctacattctggcggacccgtggggctccccctaccgctaccgcctgggcagcgagcaggccatccccaccaaatccgccaatgccaagaacctgaaaatgggcaacggcctgaatccggattatgatttctggtccttcggcaaggacggggacagcgatctcaaagacccgcatgcccctgaaaacgaggacgacatcggcaacctgccgaagttctgatccttcctttttctccgcgaacggcccttttttccggcagccttcctccctctccggcggaggaaggctgctctgcgtacagggcactatttgctggcatccggacaggttctggcgtatgatccgggcattgccatgaaacgcatttccctgattgttccctgcctgaatgaagaacaggccattccggcgttcaagcaagaagtagaccgggttttcaaggaacacctggcggcctatgccctggaactcatcttcgtggatgacggttccacggaccataccttggaaatggtcaagaaactggcagagcattccccggaggtgaaattcatctccttttcccgcaacttcgggaaggaagccgccatctatgcggggctggaagccgctacgggagattacgcggccgtcatggacgtggaccttcaggatcctccctccctgcttccggagatggtgaaagccatcgaggaggaaggatacgactgcgcaggcacgcgccgcgtcaccaggcagggggaaccgctgctgcggtccttcttcgcgcgcgccttttacaagacgattcaccggatatcggacacgcacatcgtggacggggcccgggattacaagctgatgacgcgccccgtgctggaagccctgctttccctgaaggaatacaaccgcttttccaaggggctgtacgaatgggtgggcttccgcaccaaatggtttgaatacgagaacgtggaacgggtagccggagaaaccaagtggtctttcttcaaactgttcctgtattccattgaaggcatcgtggccttttccaccgctcccctggcgctggcttccatcatgggggtgctcctctccttcatttccttcctttccatcattgtactgacgatccgtgaattgatctggccccattccgcctacggctggacttccatggtgtgcgtcttctgcctgatgggaggcatcgttctgctgtgcctgggcatcctgggccagtacctggccaagacctatacggaagttaaaaagcgccccatttacattgccagggaacgctccatcgctccttccaactagccctccccatggataccgaaccggatttcagcatcgtcacgcccagctataactacgccaggtacgtgcgggagtgcattgaaagcgtcaagaaccaggaaggggccacctttgaacacatcatccaggatgcgggctccacggatggaacgctggacatcctgaattcctatccgcacctgaaactccatgtggaaaaggattccggcatgtcggaaggcatcaaccgcggattccgcaaggcacgcggcaagtgggtcatgtggctgaatacggacgaccggctgctgccgggcgctctggctgcggtcaaggcttttgcggattcccggccggatgcggacatcgtgcacggcgcctggaacttcatcggcccggacggagccctccagcggcccatgaaagcccttccctacagcctgaacatgcacatctggtacggaacctacctggcctccaccgcactgttcctgcgccggagcaccacgattgaagaagggtttctgctggacgaacggttccgctacgatatggacggggaatattacgcgcgcctgggccgtgccggaaaaaagtttgtccattacaacaggctgctggcggatttccgctggcacggcgacaacctgagcgcccccaatgtggaacgccgggacatggacgccgaattaaaacgccagaagcagcacagcgaagacgccgccatcaagcgcgtttacggctattccttttccaagcagagctgcaacaacatcctggacggcttcatgcgggaggcctaccgcatgaaaaaggccttcctttacctgaccactccctgggaaaagtaatccgctgctccctctccttccctcctccccggagcctccggcccgtcctcccaatctccggcactcccttcctttccataaaggcgcttcccggtacgacagaggccgcagccgttttacagccgcggcccgtcacaaaccggatggaaaaaggataaaaccttaattaaggctgtcaaacagctcttcttcccggaagaatctcaccagttccacggcggcggattcccggctgtcggaagcatggcagatgttcatcatgctgtccgttccgtaatcgccgcggatggtgcctttctgcgccttctgggaattggtgggccccagcagttcgcgcacgcgtacaatgacgccgggccccttcagggcgatggcgatgaccggagagctggtcatgaaatcaagcagtttcgggaaaagcggttccccattgacgacaaggtccagaatatgggcgtaatgttcccggaggaccggctcgtcaagctgaatcatctttatgccgcgcaggcgaaacccttcggacaaaaaacgtttcaaaatggtgccggaaaggtttttccgcacgcaatcgggtttcagcaaaatcagcgttgtttcttcttgagtgtttggcataaaattagcgaagtttcaggatgaagtgagggaattacaccctaatccccggcaggtcaaggataattgcgcaactggtcttttccgccgggaaaggaattcgtcacaggcttctcttataggaatcacaccggttccgccatccggcaagccagcgcgcctctccgcgggccggcgggctgttgtccacgcgacgctggagcacccttttggccgcctccgcaaactcaaccgccgcaggctgtccgggagaggccgggcgcatctcctccagcacctgcctgagcccccaaccctgcccccggtattgttccgcggggttggttccctcccccttgaaattcacgtaatcaatcagggcatacatgccgttgggcgccgtcgccacggcattgtagcgggcagccatttccgccggacggcgggactggctcttgatgcgccccagggcagccacggacctggcaataatgaaatccgcctgcatttgcagagccgccgggctggacagccactggcgcatccgttcaggaaggccgccccgtacgtccgccgcttcaaattccgccctggtgcgccacggggccgcgccggaaaaccattccggaacgcgtgctcccctcttacggcaaaactggacaaaggagggaaagctttcctcaaacctttccgtaatcccggcggggaaccagatgaaatgcccaatgcccagggaggggaacgcctccccccggttccaggaaaccagcccctttactgttccggcgcattcattctgccagattttccgcgcgatcttcgccttcacttctcctgcatccggagccgcctgaacccagccgggcacgcagcacgccagcatcaggataaaacctgccatttttccatgcatggggttactttccttccccggcgcgggcaagtcaagccgcttcaatttctcgtgccaaagacggcgccccatgctacgcttgccgcgcacggcatgattctggcgtttaacaaaccttacggggtcctttcccaattcacgcaggaggctccccaccaccggacactggccgaattcggctttcctgccggcgtgtatcccgtcggcaggctggacgcggattcggaagggctgctgcttttatccgatgagaaagccctggtggaccgcctcctgaacccctccaaccggcatcccagaacctactggagccaggtggaaggcgttccgtccgccacggacctgcttcctctggaacgcggcggcctctccatccaggggtaccgcacgctgccctgccgggtgcgccccatgcacggagagtcggacgtaccgccccgcaatcctcctgtccgctaccgcgcagccattcccacctcatggctggaattgacgctcgtggaaggaaaaaaccgccaggtgcggcgcatgaccgccgccatcgggtttcccacgctccggctcctgcgcgtccggatcgggaggttcaccctgtccggcctggaacccggcgcgtggaaggagctggactcccgtgaacgaagggagctcatgccgtaatataggcttgattagggggaggcgcagcctgtatatgtctttccgcatcaggagatcctacctagacctttttacatgaaagccgaactcgtcgaacaagccgccaaaatcattcccgagccccagatgctgatcaacgtggtttcccgccgcgttgcccagctcaacaatggccgcgctcccttggtccccaccaccccccacatgggcaacgcgaacattgccctgacggagatcgttgaaggcaagctcgtctatcatgcggaatccgacagcctccaggaagacagccagtaaaaagcacgtcccccttattgccgttccggcccggatttccgcacggaacatcccctcttcaaccaggcccccggctcttccagcccggggccttttcatccctcccctccagtcatgagctccgacatctccaccaacaagaaagcccgccgggattacgaaatcctggacacctacgaatgcggcatggaactcaagggaacggaggtcaaatccatccgcgccggcaaggtgaacatcgccgattccttcgccagggtggaaaacggccagatgctcctgtacggctgcgacatccagccgtgggaaactgccggagagttctttcagcaccagtcgcgccgcccgcgccgcctgctgctccacaaacgggaaattttcaaactggaacagcagacctcccaaaaaggctgttccctggtcgccctcaagctgtactggaaaaacggcaaggtaaaactggcactgggccttggcaaaggcaagacccaccgcgaccagcgctatgacctgaaggcccgcgtggaaatgcgggaagcccagcgggaagtggcccgcatcaaccgccgttaatcaacgccgtccgcttcttcctttccggaggccgttcccgtttccctgctctccgctctgtattctgccggagtgagcgggaacgccctatagaaaagccgccgcgggaaagggactataacttccaatccacgggcaactccacctggccgcccttcttgtcgtcataacggatgaaaccgtgctccgccccgtaccagtggacatcccgcgtcaccttcacgtcaaaacagcaatagcgggcaatatccatcagcaggtccgtatttcccgtctgcacgtattccgcccaccacttgagggcctgggtgcccacggccgtttttgaagagccgatggaagcggcggccacggaatccagcttgacgcgcacgccgccgcgctgttcgatgtccttgcacaaatcgaggttgttcgtgatgtcgatcatattccacatcgtatagcgctggagcacgccgtagtcgaaatgctcgtggttgtaccctaccaccaggtcggcctggcgaagctgcaggatgaggtcgtccaccatctcctcggaataaatcgtgtacttgccggaagccgtggaataagtcacgcccacggaaacgcgcatgtcggccgtattgtgccagccgcccacctccgctgcggaatgacgggtttccaagtcaaaatacacgatgtctctcatcggaggaaacgtacattatttgccacttttggacaagtcccacttgaacggaaggcgcgtttgtggtgaaaataggttcatgcagccccgtttccacatcgtcatgttccatccggaaattccgcataacacgggggctgcggggcggctggcgctggcaacgggatccaggctccacctgatccggccactggggttcagcctggatgaaaagcacgtgcggcgcacgggactggactactgggccaaagtggacctgcatgtctgggacagcctggaggagttaaaacaggcggcagatccctccgcgcggttctggtacctgagcaccaaggcgcgccgctcccactgggaggcggatttccgggagggggattacctggtcttcggcccggaatcccgcggactgccggaaagcatgctgaaggaacacgcgggcaccgccctgaccattccgatgcccggagaaggctcccgcagcctgaacctctccaccgccgtggcgattgtcctctatgaaggattgcgccagctcggcatctgacacggagaccggagcaatccttcttgccgccccagtcacgacaggccacgggcatgaatggacttcccggcaacggcggcggtccaatcggaaatggaaggagctccctagccaggagaagaagcggtctccgcgcccttccgccgccaggggcgcaccagataaaagagaatcagggaggcgacagcgccgcaggtatcgcagaacatgtctttctgggcgtcccatatatcgccctgggagccgagaaaatcattcgcgtcattcccgcccacaatgaccgcatactgccattcaatgatttcatacgccgcggctacagccatcacgaaaaagaggccgaaaatccccgccagcactttccccgcatattgcttgcgcaccagatactccgctacgggaaacgcataaaaccccaccgtaaaatgggccacccggtcaaacgggttccggagggctcccaccagctcccggaaccactcgaaaggcacttccgcaaacgtgtaatgcgcccccaccgtatggcaggccagccagaaaaacatcagcgtgtaggaccagttgctgaaacggaatctccggaacccggccgccaggaggacgaccgccagcgccacgggaatcacctccgccacccagacggaacgggaagaaggggaaatgccaagggcaatgaacagcacggcgaataccgccagcaggtagaagggataatttttcatgagggagagaggagaagcagaaaagcgcgggagccgacacaggaaaggcgccggagattacctccggcgccttttccgttaaaaaacttttaccgcatgtcaatggtaggcaccggaatgcggtccttggggcccgtataaagggtcaggggcctgtacagcgtattgtcctccatctgttccagcacctgggccacccagccgcagcagcgggcaatggagaaaatagcggtgaacagcctggtgggaatgccaatgctgtaataaaccgtggcggaataaaaatccacattggcattcagccccttgcgttcccggacaagtttggcgatgcgttccgacatgcggatccacttgggttccccgatccgggaggaaaggcggatggccatgcggcgcagatgcggagcgcggggatccagcacacggtacacgcggtggcccatgcccatgatcttttccttccgcgccagtttgtcctcaatgtaggaatccaccttgtcctccgtacctatttccttgagcatctcaatcacgccttcattggcgccgccgtgaagcggccctttcaacgtgccgatggccgccgtgatggcggaatacatgtctgaaagagtggcgatgcagacgcgcgccgcaaaggtggaggcattcatgccatggtcggcatgcaggatgtaggccacgtccagaatgtgcgcttcatcccggttcggctcctctcctttcagcagccacaggaaatgttccgcctcattcagatcctcccgcacggggggaaggtccagcccctggcacagacggtaatagtacgccaccatcacgggcaccttggcgatgaggctgaggcctatctctttcaactggccggaatccttcgtccggtcgtcatacatgccgagcatggaaaccgccgtccggagggcggacatgggccgggcggacttggtggccgttttaaagaaatccagaatgggctggggaaggtcgcggtcggaacggaggcgcttcttgatgccctccagctcatcccggttgggcagccgcttgttgagaagcaggtaaatcacttcttcaaaacagcacatctccaccaggtcatcaatatcgtagcccagatacagcagacgcccttcctcaccgcgcacatcactcaaggcagattcattagctatgattccttttaaacctttgggatatgtgtgtcgtgcggaaaaagtgtcattgctcatgttttaaaaaatgctactagtgatgaagattaccgattaaaagtctaacaatcttccagaaagtcaaaccttaattacgccttcacggcccacgcggggcgtttggcgcaggtgatgtggggcgcccttacatacagcggttccgccggaccttccaaaagttcctccctgcggcccgcggccagggactgccatgcgactcccagagcctctgcatgcgggtacacgggaacgccccccgtcatttcccgggctgccagagtttccgccgtttccgtggaataaacgggcacgccattttccaggcattccgccatgcgggcgcgggcctgctctgcgggcagcacttccggagcggccgccagaatgccgttttccagccttccccaggtccagccgccgcgccgggcgtcggacatcacgcaggccttcccgtcgtgaatgcccagtccgttccaggaggaaaacgccgccacgcgggaaccgtgcaccagggaaaggccgtccgccacggcaagagccacgcggattcccccgtaggcgccgggcccggaaccgaccacaatttcctttaaacaccgtccttccagggcatccagcgcctggcgcaccgcctcaaagatggcggaggaatggttgcgttcagctctccattccacccggcacagcagttcctttccgccccatgccgcggcggaagactgcgcgcaggaagtttccagaaccagcagagcatcttgcatgcggtggattatacaggaagttccggcgcgcataaaacattttttcccccgctttccggaagcaacaaatttggttcgcatttatgcggaagtccccttatgctggccttgcacttcaccaccgcatgcccaaggcacccagacacacaccgccgcgccaggactggcgccggtatgcagaaaccgcccggaagccgcgctccacggcaagccttggcgacatgatgaggcaatgcaaccgtgacgcctgggacaagacctaccgcgcccaggtcacctccgaatgctgggaggacgaatgccaggaattcaccttcatggaccttccgcgcaaaacccggttcgtcaggcacgccgtagccacccttcttctgctcccgctggccctgattacggccatgtccctgtgcgaccagctcgcccacgcttccggcagtctcaacatcctcttctccatccccatatggtacgccctgatgggggcggccgtgtgggtggtgctgggcagcagcaggctgttcacctcatccctgctgtacctgtacgtgctgggccatgaactgactcacgtgctggcggtcttttgcagccgcggctccatccatgccttcaaggcggatctggatgggggatacatccagacggataaaaacaacctcttcatctccctttctccctattttctgcctctttgggccatgctgtgggggctggtctgggggatggcgtacctcttctggcccacggtcacctgccaggcccttctttactccggcctgggcttctggtggtgcttccacctgttctggacggcatggatcatccccaaggaccagccggacctggcggacaacggaaccttcttctccctaatccttgtttactttgccaacctgcttctcttcctggtgctgctgcgcctgttcaacgccgtaagcctgcaccgctttttgacggactgcgtccacaatgcggaaaggctgtgggacgccctcagggacctcctcatgctggcggccggcttgttcctgtgaaaaatattcttttccttaccggcaaggatgaacggcagaaggtgaaaaggaatccaacctttcagcaaaaaggagattccatgcaagccacacacttcattaccctgaccatggccgccgtttccctgatgggctgcaaccccaaggaaaccgtgaatgccctcacctccgatcaaaacgtcacccagcagatggccgtgagattcgcggaaaacatggtaggcctcccgcgggcactcgtcgtctcggatgccagaaaagcggcgccaggcgataaagtcaccgtcaagggagccgtactgggggatgaacccgttttctcaaaaaatattgcctccttcaccatcggggatccggcccagctcctggccaacatgaaggagcgcggagtgtggtccaccggaacggtgccggtggaaatacggaaaaacaacacgatgaccgttcaatttgtggatgaccagggccagcccatcaaacactccgccaaaggtgtgaacgggctgaaggaacgtgacgccgtcatcattaccggaaccattgatcctcattccactcctgaaaatccggtgctgaacattgaaagcatcgtgattgaatagcaacccttctgtgccaaaccctgattcatgtcaaacggttcgggcgtcttgcgcctgaaccgtttttcgtatcaggatgcgcgcatgggatttgatccagcatctttgggaatgataacactggccgccacttcggcggcagcgggcgcggcctccgcgtccgcccagaaaaaaagtgcagaagccaccaggcaggcggcggatgcaaacgccgccaccctcaggaacgaggcggacctccagaaacagacgggcgtggaaaatgccaaacgcatgcagcaggacgccacacggcaaatgggcgacgcccgcctggacgccgcccagtcctccctgctccgggatggttccgtgccggtcagggaacaggccctggcgacgcgcctgcaaacccggattcaggatgaagcggcggcagccatgaggaatgcccagtccctgtacaaccgggcgaacatggaacagtacatgggccgcgccaatgcaagagcccagaaaaccgccgcggcaggcaccctgctctccggattcgcccagggaggcaacgcccttctcaaatggtgaggcaatcggcgatagctggagaccaatcagcgggaaccggaatctgcctgaggaacctccgcaggcgccggaaggacttccggcaccacgccgcctatccctattttgatattcacgggaaccggcctgatgcgggaggccccctggtacagggcggccacttctacaaaccggggcgatttcctgaacaggaaggacttccccctgtattcattataagaatggtcgcaggtagggacaggcttcaatcttgcgcctttcacatcgtgaaacacaaaatcctccgcccggaacatcttctccgaatacacctcggaatacaccatgaacttccattcctcccccggttcgttcgccggcgcatgacggctacgccccgtctgcctggtcactttcagcgtcaccgtctccagcttggacatgtcggctacctccacccggttattctccagggctctccgcacggcaatagggtccggcaccggaatggaaactccgctctccttcaattccaccatcccgaaatccagagactccagcccctggcacaaagggagaaaaagagtgccgctcacctgaatccagcgggctcccggagaaggaacatcctttaaattaaggctcacgtttacccgcctcaagctcttgtcctcaataaccccttcccatagacggacggagcgcaccctcagacgcacgccattggaatcgacagccgtcaattcctgttccggctgttccggagccagcatttcagaaccgggaaacacgcaatacagcacgatgcctgtcttggtgaaattaaaaggctcccccctcaccagtcccatggaagacagcccgatgacggggcccttcaagctggtgccggaataagaagcgctcttgatgggaacatccgccgccatcagcgttcccgcacaccagcaggcgattgtgacaaaccatttcatctgcttattcggactaacagccgggaatggcagcccctcccaggccgatcttcatatctacgggcaccttgcggaacatgcgcttattccaataggaaaccaccacgcgcaaggagcggcagcgggcggaaacacggtaatccttcccccacatgcgcatcttcctgccccggctgttcaaatcgccgcggcctttcaggggaagcccgttttcctccctgacactcatggaattgaaataaaaatcactccttccctccaccttcagattccagcggttaaagtttttttccagcgtaagggccaccttgtccttccgcggcttttcaagaggcaattccaccctggttccttcctccagcagaggcaggactacagcgggcagctccaccaggtcatcagcaaaagcgcacaaaagaaatccccggaggcgcacccactccgcaccgggatcagggcgctggatagcgacggcaaaccagacgggatcaccgtgtcccacgccggacgccttggttgcatcggcggaaaccctgtaaatcttcaggcttcttcccgttgaatccgtgcagacaagctcttccggggcctcttcataaaaaacggggcccccaagctgatcttcataaacgcatgacatccccagcagcaactggggaataattttggtcacaggatcttccaccagaattctcaggaaggacaaatgcagcgccgcatcccggagcaacggaacattcgttgaagcaacagcgggatggatagctgaacacacgagaaagagacacgcggaaaaacacttcatggaggtagcgacgggggcaatctaacaaacactaacgtctgcgcaaggaaaaaggaacgctttgaaaacaagctggacatagcgaccactcagtattcctgctttcccgccgctctccgtggttttcctttcctccatccactattcataaaaaaacatggtaaaatggaaatctgctcaaataacaaggaaataaaattactttaaaaaatatagccaaatccagaattgctatatattcacatcatataagtgctgaaagccctccccatttcaagagagtgtaaatcccggatagagtccaaccttgtcaagttgacttcgcgcgttccagctctataagtcattttatccattctaacctttaagatcttttaatccaacgccatgagaacagagaaatattttatgattgccttcgcctgtgcccttatgaacgtcatagacgttcatgcagaaaacaggatgctggaaatcacatcccaaacagaaaacccatcagctgattgtatcattaaaaaattgaataaaaaaaggataaggggcgaaaagaaataggcataggagaaattgtaacactgacactaacacgcaaaggaggcaagccattgaataagaatacgaaggttacctggactaagaagggaaaaggagcaacgttaaatggacgcggaaccactgcaaccttgatggctgacttgatcatggaaaataataatgttaccgtcaaagcagaagctgaggattttcctccggcagaaattacttttaaccttaaaaaacctactcgtttaacaggaaaaaaaggagaagaatacagcaatcaatcaaatattgggttcggcattactgggtacattatcattactgtacatccaacgtccgttagcttttccaactgtggcattatagagaaagatgggggtaccgtccttgacccaaaagaacctccgccatttaaacttaacgaccatgatcccggcaataagggagatcctcctaatttgcgcaatgaattagatgaccacgtaactttggttatgttatttaacaccattgccaaattaaacggaacgtgcaaatggacatggttatgcaattatgaagcaactcaaattaagaagcgtattgaacaaatccaacagacatttaccgtcacacggacaaatgatcctgaattcccgaaacagaaaaactgttccggaaccgttacaaaattcaaagtccctttttcggtaaaggctatagaacaaatattataaatttttatataaaatgataaatctattaatctcaattggaatcttcattttttccatctatcctactatggcaaaaatacaattatttgatgccagcctcgtcaaacctgattctcttgaggttttaaaaaacgctcagacatcagcatcaacattaaaaaaacttcttgataaaggtcaatcagaagaatttttcaaggaagcagccatggagctcgaacgcatcaggaagtctacagaagaaaatgaatttccaagtgaagaaattcgtaacaatatcccttggattctttattttatcgccaatacacctcttcttaccatagattcagccgatcaggcaaggcgcactataaacagccgcgacgcagatctttatcttaaggaggaagccctggaaatgctcgccatttccacttatcgcgacctttttcccgatgataaagtatcaagagaattgatggcatcctacggggctgccattatgtgtgacttcctcaacggcactaaatcaaaatcctactcggacgaaccggtattcgtttctgataaagaagcaaaagccatgctgaagaaaaacattgaaatcatagaaaacgcattttctaaaattgctcaaatccaaaaaaaaggaacaggaccggaaacagaaaaaaagataaatgacgtctccaaagacatgaacaaacggattcatgacaacgaccagcaattcaaggattacactgttgtaagcaacacgcaaacttcccgaaaccttctgctaaagaacattattgaacgctcggagaagaatttcatgattcttcttactaatttatttcccggcaaaaaaacagagattcgtaaatatatcaagatggcaggatattccgaccaagagattcatcaatttatcgatcgcaccttgaaaaaagattgaaaggccaaattgcttgatagaacacttggcactcgaaactaaaatcaatccggagttagtgtcaaattacttgccttaatcaattcattacaaaagctttcgttttttcggatgggccaccattgagaatggcgggtattctctccgtttttacctgctgttccctacaacacacaacgcaacaagccaagcatggtttctcttcttccactcagccatcatgatggagaaattgcgggcatgtcttgtgaaaagtacaaaatgtacccttgaatgtagctcgacccagaagatcagagatgcattaggggaatgcaataaataaaaatccttgcattttcaatacttacgcaaggtattagaaggatttaggtggcgtccccggcaggaatcgaacctgcatctagtctttaggagagacccgttctatccattgaactacggggaccggacattgtccgtgcaggacaataaacgggaaggtttccccgctcaagcaaaaagcagggcaattactccatgaaccttgattttgaagcatttttttcctagaaccgttttcgtgagttttttcccaactgcttgttttctctctgttctctgcgtttccctgaccggatacggccattgtcatgacagcctgccggacgcaaggccggccatacgcgccatgtaccggcccgccccaaccccggatcaaacaggattgggcccggaggaggtaaagtattaccctctccgcctttactgggaatgggaacggtatactccccgggtcctgtctctgcttttgccggaagcggcccggaattatgaaatggccgctgtggattgtccctcctgggagccggaacgcgcagtcgccctcataggaaacgaactccactgggcggtagcggcagaaggcaacaaaacagattattttatcaacagcgctcccctgtggaagagctggtgggcctcccttcttgaaaaatatcttccggattattttccggaagaaacattccctgcatggctacacccctctgccgctctgctgaatgcatggaaggatcaaaaaatccgccgtctgcattggcaggagtacagcaggaattacgttcgccgcggcgttgccatcctgccgcatgctctggcgcaggaactcaaaaccacctggaagaagtgcatggaaaccgccgtgctggacattcctgcggagatgttcgggtgctgtgaccaaggatattccttttactccgcggctcccggactgattgccacggaattgcattattaccgcggccgtttacccctgaaacgccagatgttccacattttccatcttcttgttgacgcagcgagcatggataattttacgcctgagacccagctcatgattcatgagttatgcgccgacacccgcagaattgccggggaaatgaagaaagttcccccgcgcggtttttactggcgagagttggacgcaaaattttattcttcctgtcctgactcggcaaataacttttgggaagggaaaaagccctctttgcgccagggcaagtctgctgaagcattccttcggaaagagtgtatgacgctgcctctttcaacaaatccggtctggaaggatctgttccccaatgctccggaacacgccacggcctggatgaaaatttattcggacggccagtgcgggggcgcctatatccaccagggatttctccacacagccaccacgtatctgggacggcattcccgctttctgtacgatttcagccggatggaccatccgcccgccatgacgccctatgatttgtggtggaacggggaagaaatgagagtccggcgttcctttttgaaactggaacctgctgcggaacaggaattgaagacctatctccatttgctttcccgcttccggggcggcaagaatcatcacggagccttctctggcatgctgttcagtacggacctgggctgcaaagacctgattctgcaagctctgaaagaagaattcatggaagatgaggattcctgcccccctattcagtcatccgtgctggaccacgtttattcgttctggacttcgggagacgtcaattatcttcaggaaggctccggccaattgaatcagctccggaaaaacagggaggaattggaacggtatatgaaaaaacatcctccggaacaataaatccgcccttccggaagcggaacggggcgcacaaaagccttgagccggggatggaagagccgtagcgttaaaggtaccgtcaccgcatccccgccatgctcaatttcgtttacgataacaagaccacgctcattttcggaaaaggaacccagcatgaagcgggcgcccttctcaagccgttcggcaaaaaagtcctcctccactacggaggcggcagcatcaggcgttccggcctttacgacgccgtcacggcttccctgaaagccgccggcgtggagtatgaggaattgggcggcgtccagccgaaccccacgcttcccctggtgtatgagggcatccgcctctgccgggaacacggcctgggcctcgtgctggctgtgggaggcggcagcgtgattgattccgccaaggcgattgcgctgggcgttccccatgaaggggacgtatgggacctgtatctttccaaacaacagccgcaggcggacccgctgcccgtcgccaccgtgctgaccattcccgccgcaggcagcgagagcagcccgaacacggtcatcaccaatgaagaaaccaggcggaagctggggtacggttctcccaaattgcgccccgtgttcagcatcatcaacccggaattgtttttcacgctcccgcaccaccagatggccaacggcgtcagcgacatgatgagccacatttttgagcgctatttcaccagaaccctgcatacggacctttccgacggcctttgcgaaaccaccctgcgcaccatcatgagaaacgcccgcatcctgaacgggaacctgcacgattacgacgcctgggcggagattgcgttttccggcaacctcgcccataacaacctgctgggcgtgggccgtgaacaggactggggctgccacgccatggagcacgaactgagcgccctgtatcacgtggaccacggcgcgggcctggccgtcgtcaccccggcatggatgaagtatgtttcccccaaacaccaaggaatgttcgcgcagttcgccgtgaaggtgatgggcgtggagggttccttccgggagccggaggccctcatccgggaaggcatttcccgtctggaacgtttttaccgggaattggggcttccgacgaccatggaagagttgaacatcaagtccggggattttcccctgatggcggaacaggccatcagcgtgcgcggccccatcggggggctggaaaaactggacgcccgggacgtccaggccatttaccgcctggcatgcgaaggcccgctgcccgattgacggcatccccgttccttcctccctcctgcattccgggacggccagccatgcaggccgtctttccctcccgcagagacatgaacatgcatgcggttcggctccctcatccggcagagctgatccgggacgaggggacggcagtggaatataaatatacccaggcagtccctttccctgggaagaagagaagacggcggttgcttatcctccggaggggaacctgaggaagccgccctgaaagctcaaaaaggacgccgcggcagatgatccgcaccggaatacaggccggaacgtaaaaagattccggtttgctcgttgacagtcaatctttccaacgcttctggccattgaacggcattaagacaatctcccgcatgttgtaacctacttgtaacttgccaaatattttacatggaagtagtctggttgaatgaacagaatcttttccctgctttttctggcgggaggcttgctggcttccggaatgccgtgcccggcagccgcttccactccaccgcagcgtcaggacggcccgtccgcccatgccgatgacaagggaggacttccggaagattccacttcttcatcccaaaaaggcgccaaggatgcggacaaggcaacttccatctcccagcagaggaagcagtccgttgaggctattgaaaagcttttgaaaaagaggttgttcaagaatgcggccgaacaggctttaaaacagcttgacgaatacgacgaccagtacagcggagcggaccttcttctttattaccaggctttgacccgtctcaatgccctggacgattccacgaatctggataccattctgcaagagcagatgaaacgccacggcggcaatccctatttcctgatggacgctgcccatctgtaccagaacgccagccatacgtttaaactggtggacggcgcctacatccgcagcgccgagccatgggacggggaatattccggggaagcaagggaccgggtggaagccctgcggtgcctttccaaggccatgcaactggcggagaaggaaaagaacatgaagcttctgggacaactgcgcttcatgacggctcaggcgttgctggtgaaaggcagccgctacagttccctttcccccttccaggcttacgccgccctggggaacctcaccagcctgaaggaactgccggggtacgtcgccagggaggaagcccccccgttccggaacgtcgccaccgtgcccgtcacggtcaatgccaaaacggggaagccggaagtcgtcttttaccatgcctcttcctcctgggagacggctaaaaacgacggggaacgcatgcgctggctgctggacgccgccattcaggcgaacccggaactagccaaccaggtcaactatttcaccgcctcctggtgccaccggctgttctcctattccaatacggctccggaccaggagttcgtgtacggccccggcaacgcgggcatggtggcgggcatcaacccggaggaattgaaaacgaaccagaccgtcgttaaaaccgaccggacgggcaacggaaaattcctgctcaccacccttcctccggattacgatttcatccggatcgccgctgcggtccgagtaactccggagccggattattacgttaacgccggcaatctggcagccaatgagttcctggcccgcaaccagaggcccgctgccgcggagcttttaggcaaaatccttcagacctggaacgcacaatcctggaatcaaacggacaaggaggatttcctgcacgttgcggacaacctgaagaagcgcattgcctccatcacggaacccaacggaatgtttgatgcggataaaagaacgctgctggcgggggaaccggtgacggtcgccttctcctaccgcaacgccgcccaggccagcgtgacggcccgctccgtggatatgaagcggtggcaggaggaacgcatggacaaggtgcagacctccagcacgctgggcaacgcgtacaggaaaaagtattccagcctggggaccctccttttcaatctgctacatgagccgtcctacgcccgctatctgggtgaagaaatcaaaggggaaaaggtagctctggctcccggggaacggcacctgaaccgcatcgctcagattcccgtgcccacccgcaagcccggctggtacctgcttaccgtcacgctggataacggctaccggttccaccgcttcctcactctgtcagacatggtattggtgcgccgttccgtgccggaaggcaacctatggttcctggcggatgccggaacgggaatgcccgtggaagggggcagcctgcgcctccttcgctaccaggaggataaaacgctccaaaaacaccaagtgaagggaaccacggacaaggacggagccatgatagaaacaatccctccccgcggttcccgcactccttcttacaacatgttcctgggcatcgcttccaaaggggacagctatgtgctggcgggagtatcggattacggctgggaatccggcaattatctcatggatacggcaaacaaggcctccgacccctattcctgcttcttcctggaaagccagcccgtataccgccccggacagacggcgcggttcaagggcgtcctcttccgtccggacatcgcaaatcccggaacgaaggactgcgccggaaaaaagctgacgctgaccattacttccccaaccggggatgagagcgtttttccgccaaaaaccgtcacgacggattctaccggctgttttgaactggaactgctcattcctgcggaagctccgctgggccagtatggagccaagctgaagctgcatgattccgcggacccggatttccggctgtatgcccctctcttccgtatggaagagtacaagaagccggaattctccgtcaggatggacgccccctccagacccatccgcctgggccggcccattcccgtctccattcaggcggactattacgcgggcggtcccgtaagcgaggggaaggccaccattacgatcacccggacactgggagcggatgtctggacgccctactggaaatggagctggctgtacgacaggtctttcagcccgtactacattcccttttctccggatgcacccctgaccgtcctggaaaagacggtgccgctggataaggacggaaaagcgtccgtggagctttccacggcgcaggacgcccgggatttcgcatcccagaatatcacctaccgcgtctccgccagcgtgacggatgcctccctgcgggaagtttccgcttccgggcaggtcatcgccaccttccgcccgttcaacatcttcaccgccctgaaccgcggctacgcccccaccggaacgccggtgcaggcctccatcaccgcggccacggcggacggcgccaagattgctcacgccaagggaacctccgttttgcagcatatccgcgcggacggcagccgggaggctctggaaacctggaatatcaccaccggaaaggaaggggaagccaccctgtccttccagaccagggaatccggcctgtatgccctttcctctaccctggaggacgaacacggcaacagggtggaagagtctttccagttcctttcctacggcaagggcaaacagaatccttttaaaatcaatcccctttccatcactccggacaagaaggaatacgcaccgggagatacggccaaactgctcctcgcctctgattatccggacgcccgcgtctggaccttcctgcgcaattcctggaaagacgagtcccgcagcctggtccctctggaccggcaaaccgccctggtggaatgccccctgacccgggaagacatgcccaacatgggcgtgaacgccttcaccgtcagaaacggggaacttcacacggcttccgccgaactgctgattccgccagccagccagattctggctccttccgtaacaccgggcaaatcccaataccagcccggtgaagaagggcgagtaacggttcaggtcaaagggccggacggcaaacccgtcaggaacggcatcgttaccctggccgtctatgacaaggctctggaatatatcgcacgccccaatattacggacatcgccaagaccgtctgggggagcctgaacgaaaccggctttctcagcctgaaaaaaatgacggccgccggaacgcagcaggaccgcggcccggaccagccctacttccaatccctgctctacagtgactacggctatctgttgcggagggaaaaaggagccgtcaacggctttgctaccgcaggagtcagatccggtaattatgctatcagcggaaaagccgcaagccgcgtattggctgaaggagcggcagtccccgccgccgcaccggttccggccatgcagcagatggcttcggatgaagaaagcgcagaaagtgattcctttgcagccggacagggagacgcagacgtgcaggagaacagttccccgcacattcaactgcgcaccaattttgcggactgcatcaagtggtgcggcacgctcaggacggatgaggaagggaacgttaccgttcctgtggagatgccggacaacctgaccacctggaaagccgccgcctgggccatcacccccggattgcaggtagggcaggcttccgcggaattcctgaccacgaaggacttcatggtcagcatgcaggccccgcgcttctttgtggaaaaagacgtagtgatgctcagcgccctggtccgcaaccggacggacaaggccgtccgcgcccgcgtttccatttccctgaaagacggttgcctggaacttctcccggctgacgctctggccgtaaaggggctcgccgcagatacggacaattccgccgtgcgggaagtggacgttcccgcccaggggcaggcagtcgtcaactggtggaccgccgccatcagggagggaaccgccgccgtcgccatggaggcggcgtccggctccaccggagacgccatgcagatgaacttccccgtgctggtgcacggcatgaagcagctccatgcggggagcgccgtggtgcttcccggagaacgggagcagaaactctccatttccctgccgcagcagcggcgcagggaggaaagcgagctggtcgtcaaggtttcccccagcatcgccctcagcatggtggaagccctgccctacctggcggaatacccctatggctgcgtggaacagacgctcaaccgcttcctgcccgctctcgtcgtgacggacgcgctcaagcagctcggcctgaatcccggcgcggcgctgaaaagccaccgcaatctgaatccccaggccatcaagaacaaggccttccatgacagcgtcatgaagaagctggaacgcaaccccgtttatgatgaagccgcgctgaagaagatggccgccaagggaatctcctccctccgggagaagcagctctccaacggttcctggggatggttcggaggagccagcgagggagaccccgtcatgacggcccatgtggcgcacggcttgaagattgcttcaaacacggtcaatgtcccggatgggatgctttccggagccgtccgctggctgaaaaactatcaggaaagccaggccgctcttcttgagaaaggagacgaataccggaaactggaaaaactgccggacggcccgaagaagaaggaagccatccgcaagctgggggattaccgcctgacggcctccgccacggacacccttgtttattccgttctggcggaatgcggcgtcaaaaacctgcccatggaacgctacctgttccgcgacaggctggaacttcccgtcatcagccaggttcaactggcggaaatcctgctggacgcccaccgcatggacgacttcaagaaggtaatgcccatcatttcccagttcctccagcaggacgactccctgcaaaccgcatggctgcgccttcccaatgaaggctactggtggcggtggtacggcagcggcgtagccacgcaggccgcctacctgaaactgatggccaagagcgaccccggcaatcccgtcacggcgcgcctggccaaatggctgctcaacaaccgcgccaacggttcctactgggactccaccaaggatacggcggattgtctggaagccctgtccgcctaccttctccagaccagggaaggcatggaggacatggaagcggaaatcctttacgacggcgttccggtcaaaacgatcgccagtacgaaggagaccctgttcacctttgacaacgccttccgcatgagcgggaaagacctggcggacggcagccacgtcatcaccatccgcaggaagaagggcagcggaaacatttatgccaattccaccctcagctacttctccctggaagaccccattcccgccgcggggaatgccgtcaccgtggaacgctcctactaccgcatccggaaggaaacggtgaaggacgactccgtgaaggacacccagacggatgccggagagctcgtctcccagggcaaggacctgacccgccgcacgctgttgaaagacggagacgtcattgccagcggcgacatcattgaagtggtgatgaccgtgaaaacgaagaacgacgtggaatacctcatgctcctggaccccaagcccgcgggatgcgaatcacaggaaaccaccagcggctacgcctggatggggaccgtatctggctacaaggaaataggggatgaagaaatacgcgtcttcctttcctccctgcccatgggacaataccagatcagccaccgcctgcgcgcggaacgcccgggacgcttcagcgccctgccggccgtcattgaggccatgtacgcgccggaactccgcggcaacagcaaggaacacaaaatcggcatctccatgcctgccgaatagaagcccggccacccgcagggaccccgataaaaacgcctgcatcagcgcccccgtaaaggaacaggacttcagccagggtcttcttattcctgttccgcctcaaatcctgccgcatggagttgaggcggaaagcgggcaataccgccactccggccccataggagccgatgcaattttggacgaacggcgggtcaatcattttcccgttaaaatcaaatgaagacggaaaccggacctgtccggcgtcagggggaaaaaaccggagagccataccttcccaattccccggatgagcatgcccctctccccgcctggccgttctctccggggctgcggttccgcgctaaaaactcttgcaatccgtccgcggaagcggagaatgcgttgcccgctgcgcagcgggccgtaccatggaatccggaaccctgaagggacacatcgcgatgggagcggcggccgttatctggggcctcatgtctccggtcagcaaactggtcatgcagccgggggaagtcagctccgcttccctggctaccttccgcctgctgggagcggccatcctgttctggctggcctccgccttcgtgcccggggaaaccattgcaaggaaggaccggctgaccctgttttacgcctccctgttcggcatcattttcaaccagatggccttcacggtgggcgtgggattcacctctccggcggatgcggccatcatcaccaccattacgccggtactgaccatgattctggcggccttcgtcctccgggaaatgatcacggggaaaaaaatcatcggggtctgcgccagcgccatcggagccattctgctggtttccggcagcggagggcgtgcggcggccctgccgggagacaacaacctgctgggggacatcctttgcctggcctcccagtgcagcgtagccgtttacttcgtcttctttaaaaacctgatcggcagatactcgcccgtcaccctgatgaaatggatgttcacctacgccgccatcgcctgcctgcccttcaccttccgggacgtggtttccatccgttattccgcacttcccctgcagacgtggctgggcattgcctacgtggtggcattcgctacctttgtaagctacatctgcctgtccttcgcacagcagcggctgaaacccaccgcggtcagcatgtacaactactgccagccggtgattgcctcttccgtagcggtgctgtggggcatggaccgcttcggctggatgaaaaccctttccgtcctgctggtcttcacgggcgtgcttctggtcaccagaaccggaaaaaagaccgccgttcaggaaccgtaaataatcgggaacttcagaaaacggccttctacagccacgcaggaatgaacacacttgtttagggaggcggggcattcccgaaaaacccacttggtgaactcccttctgggaagaaggtcctcccggtccctacggacgccgggcggaacacagcaagagaaaattcccctccacgaaggggcggaaaagctcccgtccaaaaaccggaagccttccttcccaggcaaaaatccgcggatacaaaaaaaggcatccctccctcaaagctaaaacgccactaaagcccctgacactccgtgatctcccatccccctcccggcagccctgaaaaaatagatgggaaaatacgccccggcaaggtataatacgcccgtagtctccgccttttcccctttccggggagtcctgcttccctgccatgaaccgactctttctatcctgggacaaaccggcctgccgggctgtagcggagcggctgctttccctgggaaacgacttccaccggaatctggtgctggtccccacacgggaatccggcaggcaattgagggaataccttgcctccatttccagcgcacaggccatcttcgccccccaggttattccggcggaccagttcccccggctggaggaaaaggaggaaacggcttccgtcctggaagagctggccggctggctccaggcgctgggaacctctccccaccgtctttatccgcgcctgttcccccggcacatgccggaggatttttccagcatgctggaaatggcgggcagcctgcaaagccttaaacacgccatggcgaaccagggcatttcctgcggcatggcccaggattcctgcgcgggccgtgacgaacgctggacggacatggacaggttgtcagagtactgcacgcaacagttgaaaggctggcagcttgcggacagaaccgccatggaggcggaagcaccgccgcatctgctccattccctgcgggaaacaggagggcacgtcatcctggcctgcgtagcggacgttccgcgccccctgcgccaggccctccagcatgcggaacgcagcggcgtgcccgtccagatatggatacacgcgccggaagaggaagccggttcctttgactcctggggatgcccccttccggaagtctggacccagtgccccatccatatcagcgacgcccagatcaggatcacggccaaccctgcccggctggccggggaaacgtgccgcatgatcgcccgcacagcggagggagcaacgccggacgtcgccctgggcgtttgtgatccggacatgaacgtagccctggatgccgccctgcgggaatacggctggggcctccacaatccggaagggaaaccctttgccggaaccggcgtcatggacctgctccgccacctgcggcaggcgctggaagaaaagggcgcggcccggcccgtcttctgcctggcgcgttcctccctgctctgcgcctccctgggaataggcaaccagcagtactgctgcgccgcgctggataaaatccagcagaagttccttccggaatcggaagattacctgctttccagactgaaggaattttatccggccgccctcccttccatccaggccattctggcctggcggaaccggatggcggaacccggcacgctgggggaaaggctgatggaatggttcccggccctggcgaacgcctacggtccggaaacggaagccatggaaatgctccattcctgcctttccggcctcatacgccttcagcaacgctctaccgccttctccagaccggagacggccctccagctcctgatgaaatgccttcagccgctgcgcgtcaaaaacagaaggaaggcccacgcggtactggattccctgggctggatggaagtccacttccgcccggagaaacaccttattctgacgggattgaacgaggggaccgtaccggaaggcggcgtttccgaccagttcatgccggaggaactgagggaagccctgggcatcgattccttcaaccggaaaaaagcccgggacagcttcctgctgaccgccctgctccattcacgggaacgggagggcagcctcaccatcattctctcccggaccagcagcaaaaacgatccgctgacgccttcctccctgctcatgcgctgcccggacgcggaactgccgcaccgcgtggaacagcttttccgggaaatcagcgatccgcccgcacccctcccctaccagcgcggaagctggtaccttcagcccgcagaaggctggaaggccgccacggacatcggcgcgatggcgcccggctacaaaaacccgtggaaggaaaaagggctggccttctccccctccgtcctcaaaaggttcctggcgtgccccatgcgcttctggatgagggaggccctgcacatgaatgaggaggagttcctgccggacaaggaggacatggccgtcaacgaactgggcaccatgctgcacgatgtgctggaatgcttctgccgggaacacgccgccctgaaagacggcatggaagccgccgcccttcaggacgccatcacggaaatactggaacaaaccttccggaaacaatacggccccacccccctcatgcccctgctgctgcaaaaacgctccatggagcagaggctttccgtttacgccgtccagcatttgcaggaccttcaggaaggctggtcctgcatcgcctttgaacaccaggtggaagactggtccctgggcggcttccccatgaaattccgcattgaccgcatcgaccgccatgcggacgggcgcatacgggtcattgactacaaaacgggagcagccgcatcctgtgaaagaaagcatctggaaacgatcgggcgcccggacgccctgtccctgctttccccggccctgcggccctacaccaaacgccagaaaaacggaaggctggcgcacgcgcgctggaaagacctgcaactgcccgtttacgtgctgtgggccgcggaagcctatggcggccacccttcggcggcgtattacgcccttcccgccaatccgctggacatcggcatctccgcctgggacacgcttcacgaccccatgcccggctatgaggaatgcgcgctggacagcgcgcgcgcctggacggtggagctgatgaagctccttcatgagggccgcgggctcatcaccgcggaggaactgggctggaaccctccctcctacgacgtgttcaaggacctgatggcctcccggcgtgaaagcctgcaggacctgctgggcctcaacctcaccccccacctgcctttctgagatgttctccctgaccaacatgctgatctccgcatccgccggaacgggaaaaacctaccagctttccctgcgcttcctggggctgctggctctgaaccacggcagccaccccgaacggctcatcgccatcaccttcacccggaaggcggcaggggaattcaaggaccgcatcctgacggacctggctgcgggggctacggacgaggagggggcgcaacgcctgaaagaacagctctggacggtcatcaagggaacgccgggggaacccggcatctggcccggagcaacggaggcatggaaggcggaaaacctgcaccgggagcgtttccggcatctgctgcacatcctggtgcagaacctggcgcgcctcaacctctgcaccattgacagcctttttgcccagattgcctccaccagcacctttgagctgggcgtcagcggcttcagcatgattgacaccacggcggagaagctggcgcgccgcgaagccctgctttccctgtaccgggaatgctccgtgaacagggagcggaggcggaattttgaagacgccttcctctccggagcggactccgatgcggaagccgcggatgcggaggattccatgatgcggcgtctcaacacctaccacgaacttttcctggacgaaccggacgccggaacatggggaaaccccgtcgcgctgggcttcacgccggaagaactggccccccccgttcccctggaacaatttgacgccgtcctgcatgccgtggctttccaggcacagcaggcgcccgctccggaagggaaaaacggctccaaaagcaaagaactgttcctgcgcttcctgaacggtttctcccaatacgccaggctgggccgcgtgcgcttccgcacggacggaggttcttcctggaacatcaccgtggaagaggcgcgggaaaaattcaaggacttctggtcccctccgctggaagaactcatccagagctggctgcgcatggaggtcctgcaggcgctgcgccgcacccgcgccacgcacggactgatgctcctttttgaaggcaaatattcctccctggtccgcaacaagggaaggttcctgtttcacgacgtcacgcgcatgctgggcgggggagccgttacgccggagctcaagagagacctgcaataccgcatgtactgccgctatgaccactggatgctggatgaattccaggacacgtcccagtcccagtggcgcgtcatcaagccttttctggacgacctgacggaatccaaggccgggagcgaaggcagcatcttcgtggtgggggacatcaagcagagcgtgtaccagtggcgcggcggggatccggagcttttccgctccgtttccacccagcttcaactggaagaacgcggcatgtccacctcctaccgttccgtccagcccgtgctggacctggtgaacgacatctgcgactacgcccggacggcgccggactgcgaacccgccgccctggaacaatggggggaatatccggagcaccggtgcgccccccatctggaaggccggtccggcgtctcccaaatctggcagacgcccaaggcggaagcctccaccgccaacgacctggtgtgccaggcggcagccgacatcctagaacgtaccggagccctgcgccgcggcctggaaaccgccattctggtcagcacgaaaaaccaggcgctagccatcaagacctggctgacggaccacggcgttcccgcggaggtatgcgacgacgttccggtgggcgtggattcccccctgggaaaaaacctgctgtacttcttccgctggctgctcatgccgggagacccctttgccgcaggcctgctcatccattcccccctccggcccctcgtcactccggaacggcctgaaggcatggactggaaggcctggcgcctcctgctggaacgggacggctacgccgccgtcatggaagaactggagcggaggctggcccggacgggaacggaactgaccgaattccaccgggaccgcctggccgtctggaagaatgaggcggaacaggtggacgagaagggcgtttccctggatgaatggatcaggcacatggaagacgtgacccgccgggaggatcctgccgggggcatcgtccgaatcatgaccatccacaaatccaagggcctgggattcgacatcgttatcctgccccagatcggcagggacgccccctttgcggacggaaggcacctgacccactttgtcaaaaagaaccgggagggcaacatagaaggaatcgtgctggtcccttccaggcatgtttacacgaacgttccgcagctccaggagctttaccgggaatggcgcgcccagcagcagtttgacggcttctgcaagctgtacgtggcgctcacccgcgccaagcgggccacgtacgtcattctcccctaccgggaagaaaaaggtgaaatgaccgcggattccatgtggaaggtcgtccgttccgcagctcggtcctgtgaaaaaggaacggaagacacgcttccggaatccggggcggaatgcctgtattcctgcggccatggcgggtggtacggagaattcacggaatccgtacgggaacgggcgaaggaagacacgccggaatggcccctccaacgaccgatggtcagggagcggctttccccctccggcctgccggcggcagaagacgcggcccacgaaggaagatatgccgacgatgcggaatccgccgcattcggttcagccgttcacgccgtctttgaacggattacccgctgggatgaatcggacaagccggaatgggctcttcatcccgccacggaggcggagcgcacggtggccgcctgcatggagattccctccatccgcgaactcttcacccctcccggaacggcacgcatcatgaaggaacagcgcattgaagccattgacgggaacagttggatctccggcgtgattgacaggctgctccttcatgacggaagcgcctgcatcgtggacttcaagacggaccatgcggactctccggagcaattgcgggaacgccactccaaccagttgaacgcctacgcccgcatcgtgtccagaatcaccggaataccgccggaacgaatcgcgtgcatcattgtttccacccacttgaaggaaaccatccgcatttaaaggaatttttttcctgaaggaccggcagttgtctttccccgcattttccttgccgttcctccctgcgttcctgtgttaacgacggataatgcccctatggaaaaaaccgttgccgcggctggaaaacatgccgccccgaaggcgcggaaagggaaaggccgttaaataaaaaagccgtcccgcgcggacgcggaacagctttgaatagaaacggttggaaccttcctggtcaggcgcggcggcggcgcaggcacagagcggccaggcccagcaggctcaaagtagccgtagcaggttccggaacctgggtcagggaaaggtaattgagggccgtacggccaaaattgctggaaccgtccccctgaatcgtgagagtaagcgtcccgtcttcccccaccacgatgtgctccaccgtggaataaaggcccttgttggcggaaggattggagccgtctgcggcattccccggagccagaacgccggaactgtcgcccgtcgtcgtggaaagctcgttccaatcaccgctggcgtttgtgccaaagtttgtccaggtcgcgttggaagcgtcggcgcctccgatcgtccacgtctgtccggcaaagacgtccttacccgtgaaaccgccgaaaagggacaaggtatattccccggcggcaagaccgctgaaagtcacggtaaaagaaccggaaccggtcgccgtctgcgttaaaaggccgtctcggaagctgtctcccagggagaaaggcatgctgccgccaaaagcgttcttccacccgttttcttcgcccggcgtcttggtcgtggtatggccgtcatcccccacagggtatccggccgtgctccatcccaaagtgacgtcgcccggcatcgtgcccagggctgcggaggaatggtcgtaattcatattgagggctccgtctgtcgcggcgtcatcgcgcccgaagtcaatttgcacagtcgccgcctgcactgccagcagggaacttgaaatcagagccagagaaaacaaggacttcttcatggtgacacaaagtaaaccggatcaataatccgatgtcaatggaaaacactaaaaattaaataatatatcttttttgttttccatgtattaagtgattcatatcaagacataaatatatataatgtatttaatataaatagatttaatattaattaaagaatttatgcaatcatcggattattgatccgcaagagcattcctgttccaccggcattcgagtaaagaaaagatggccgaagggcggtttataaaaacagccggacttttaccgcgccgccgtttccaccggaatacggccgcgccgggaaaacagctattcgccaaaaaagacggtcaatgttcaggcacagccacccggatgctttctattcccagataacgggcaatggaacggttgatgaattcatccgggtctccgctgctcatgcgccacatcacggaaacatagggagccagaggcacgggctcataaggagggaccgcaatgtttctctcccccttttccagttcatggcggatgaacattttccgttcctcgcactggcggtggatgcgcgggaaggcatccagatacccggagcatacccacagggccagcccggccgccgcaagcagcacgcaggaaggaatccaacgcctctgcgcggcgtccatccataccccgtacagccccaggatgcccgtcatcatcagcaccgtggcggaaaacatggcatgccacgcgggaatcacgcgcacaaaaaagctgattgccatggcatgagccaccagaatgaacagaagggaaacgcacatgcggcggagagaagcccccttccaagtcttccaacctcttctccacgtcagcaggatcagggccacggcgacggctgccagcaggattttaggaagcggcatgaactcgtaaaaagcattcatcagttccggaatggcgccgaaacgctccgcccaggaatgaaggacggcggcgccacccgccgtctccgaatgaagacgcacgccgtttcccggagccagcagaagacaagcgccgcccagggcatgaaaaccccagccgacgaagaaccagcggggaagaaccaggctcttccagcgcgcatacagccagtacaggaacagcatgcccagggaagcgggaatctggttctcattggtcatcccggcggcaaaagccgccacgcctatccagagccaggaaaagggcctgtccttaatccgggaggtcccggcccataagccgcggtacaggcacaggaagcccagccagacggcggctgaccacgcatagtttgtccctccagacagccagaacatcgtgatgcccggcctggatgaagacgtgagcagaagaagggcgcccgcggaaaacagcagaacatcccgccagtgcccggaattcaccctccttccccgcgccaggtaaaacatcatcagggccagggaaagaatcacgaagggattgacggccaggaaaagccacttccccgccgtggccgtaaagacagccaggaattcccccaggcggggattccagttcatgtacgaccaccagcaccgttccagcacgggctggaaggcaagacggtggccagccccgaatacggaatgcatgaagctgtccccggtgaagggggtccaccaggtgagcagtatggcgtacacgagaagcgccagcaccaccgcccggaacaggaaacgcgccgccagtgactgcttcatggaatcaagccgtatcaagggtcgccgcccgcgtttaatccgtcacggccttgaataccggggtgggcagcttgtccggcttcttgccaaagaaatcccccacgtccttgaatgtcacgaacaggaagaagcccatcagcaggaagacgaagccgaactgcacgaattccagcactttcacgttcaggggacggcggaaaaccagctcaatggtgttcatcaccacgtggccgccgtccaccacaggaagaggcaggatgttcaggatagccaggttcacgttcagcaccacggagaaccacagggccagcttccagccttcctccagggagaacatcttgtaaaactggttggcaattcccacagggccggagaggtgctccacgcccacgctgctgccgggggccgccaccttcgccagggtatctcccatccatttcaaactctgcttgatctgcgcccacggagtaggatgcacggttacgtcacggcccacggagctgaggtcccaggttacgcccagaatgggctgggcgcccttgagcagggagccgttcgcgccgttgtgccagttctccggcagcctgccctggatgttcacctgcctcgcggcgccatccttgcccgtcacgtccagcagaagcggttcattcttcttcaacagcccatccagcgccgcagggctccagatgcgttccccgttggcagccgtcaccacgtcgcccggcttcaatccggcctggtcggcaggagaattgggaagcacttccccgatgacgcagggcatcgcctgcatcagccctacctggcgcatgccggagcgctgccaccaggacgtttccggaatccggaacccgcaggaaatttccatctctccttcatgcccaggcctctgcaccgtaaaaactacctggtcatgctcacccagcataatcagttcccggacgccttccatattgcccgcccacttgtccaccgggcggccgtccaccttcacaatcctgtcgccgggcagaatgccggactgggccgcagggctgtccggagcaacaaagccgaccgtagtcacccccatctccacatcaggcttgcccaccatccagacggccacggcaaaaaacacggccagcaggaaagaggcgatggggccggcggcggccacgatgatcttgtccaagggggtaacgggcttcaaatccttgggaagctccgctctcccttcaatagcctccatcggagccatttgcggtagggaaacgaagccgccggccggaatccagcccaccccccattgcacgccgttaacggtctttttccagatggggcgtccaaaccagatttggaacctgtccacgtacaggccgcgccagcgggcggcgaaaaagtgacccagttcatgaatgaaaatcatgaagttaaacaacatcaccacaccgaagataatggcaatggtggtaagaacggaaagaatgctatccatggtagtgctttgtggatcaggctatcatgacgcatcccggcggacaagcttcaaggatgtcctaatgacagagggaacatttaaattctggacatgcggcagaaaacaccataacaacaaaagatgattgtctccaagtttctcatgacgggcattccggcagccgcattgatagcctgtacgccctttcttcacgccgcgcctcaggaagaagcggacatcccctccatgacccggacctggacgaacaaggagacgggcgccaccttccaggccaggctggccggcttgaacagcgtcaacgcgatcatgcagaacgtcttcacgaaaaagaaaatcccctttcccctcaaaaaactttccagggaggacctggactggattgacttccacaaggagctggtcggcaagacggatgcggagctggctaaaatggtcatcccgaaaggagtcctgggcaaacagctgaaagggctgacctaccgggaaaaggacggcaagttcgtcaaaatggacggcaaatggaacgccaggtattttatcctgtattattccgcgagctggtgcggcccgtgcagggcctcccttccgcgcaacctggaggtgtaccgggataaaatcgctccccgcaaggatctggaagtagtcctgtgcagcatggaccatgcgctggaaggcgcccagaaatgggccgtttccaataagatgccgtggccggtcttcctgttcggctacctggacaacctttccaaggaaagccctctgatccgcaagaattatcccggtcccatcccctccctggtgctggtggacgctaacggaaacaaaatcgcttccggcagcatggatggactggtgcggaaggtggaggagctggccagcgcggaaaaggaaaaggaggcaacggccgaatccgaataaacgaatcctcccctggcgggatttcacgtttttttccgcacccggacatgaagacgcaaaacagccccggaaggctaacctccggggctgtttgttaatgtttactgaacagatggactctgctgcgtcttaggcgcggagagcggcaccatccttggcttcaatggctttcttcgcttgggcgaagatggcgtcaaaagccttttcgtcggagacggccaggtcggcaagaaccttgcggtccagatcgacgttggcggctttcaggccttccataaagcgggaataggtcagaccgcggtcgcggacggcagcggaaatacgggcgatccagagacggcggaattgtcccttgcgtctcttgcggtcgcggtattcatactgccaagccttgtaaacagcatccttggcgtagcggaagagtttgctgcggaaaccgcggaaacccttggcacgcaagagaatgcgcttacggcgcttgcgagaggccggtccattagtggcacgtggcatagcttatttctatttctatcttgaacagactgttcttcctcacctccctgcagtctcgcctgttcttatcttctcattggaagaaggctgcatgaaggccccccgttcagcggggggaaagctcggcgttggtcgagcgtttccgcggtttaggcgaaaggcaggttctgcttgactgcccagacttgcgtttcgtccaccagagccaccttgccaagctgacgcttgcgcttgctggatttcttctggaggatgtggcgcttaccctgtttacggcgcagtaccttgcccgtgccggtaaccttgaaacgcttggcgactgccttgcgagttttattgataccacctttgcgggtcatggtggaaggagtataggcgccaatccgctcttggcaagtggaaaatgaccccgaaacatttttccggttaaaatggcacgcttccccacctgcccggtccccctcccggaccagtgcggcacgctcaaattccggaggaaaggcggccttcctttttctctccctccttcgggacatccgctcttttggcgcaggagatggaataaagcagcaggacggggaacagcaattccagaggcagcatatagcggacttcatacgtagtcgccgccgcgccaatggccagaaccactccgtaaaatggcacaaaagggatcagatacgcctttttcttcatcattccgtaaacgaggaagctgagcacgcagccgtaaaacagggaaagctgcggcatatccctgacattgcccgcaggcaggttccaaaccatctggctgttcagaagaagaatcttccccgccagcaggggattgtccgcagaaacggagaaaaacagattcctgacaagttcccctttgccggacaaggtccacgcaaacccatacttcattcccgtctcccaggactcaaacaggcccgtgtggagatacttctgcccgtacccggctgacactgcgggatgcagggaatcttcataaaggcggtactgcctcatgatgacgtccctaggcatgatttcccgttcaatcagctccatgtctccgtcactcaccttcccgccctctgcaacaatatcacagaccacatgagccatcttggcatacttggtgccggacgcgccgctttccgcatccatcagaaagggaaggacgagaaaagcgaacagccagcagcaaattccccctatcacgggaatccccaggcggcggaattccgcacggtgatggaacatatggacggacagggccgcgacagtaagaaaaaacggaacggctccgtcatagcgcaggctcccggttccggccagcccaagaccgatcagccacagggcggaggtgcgtttttccaataaccaggagcataatcccaccgtaagcgccatcaggaaaatggaatagggaacgtccttgatcaccgtcgtcaccatctcaaactggaacaggcacagcaagacggctcccagcacgatcagcgcccgcatccgttcgcgcgccgcccaggaaacgatcatgaagcaaacggacaacagcagccccagttgaaccagaacgatggcctgaaattccggccagacgcttaaaacacccttgcacagcagggtgtgggccagcgtatgcatcaaattatactgtccgctgacgatctggggatactggcgatattggaaatcaaaggaacactgtgaacccgcatgccaccaccacgccagcacggcgatggaaataacggccatgacgccccatttcccccaggggctccactccgtttcatggcgcgcgccataccataccacgccattcaacgcctgtacggacaggcataaagccattaaaaaaattccatactggacaatagaggatgcggcgccctcccaggttccgaaacacaggccatccgcacggaacacgagacccagggggaaaagaatgacactgcaaattccgcaggcagccaccaccttcttccacggcagcatgcagtcatccgcacgccagcgccataaaacaagcagagaagctagaatcacgaagaaaaagaatacgccaaacatcattccgtcacagtcaatgaacccagtgccgctccggcgcctggacggataaactaacggattgctaatccgttacggattagcacggaatggactccatgccacagggagcgccgcaagccttgcggcatccggacatcaacaggaacggcagaaaacttttttccctgaaagtcagggaatcgtagcgagacacctgcttttcaacggctgcaaaggcttgcgccgctccaaaggccggtcatgcaattacggaaaggttcaccacaagggaacgtttctcaataaggacatggctattcagcataagtcccttgttataaaaaacaggccttgaccccggattagcaattcgttttttgaaatgcggcaacctcccatgccttctccgtaaaaggattccccgtttttggcagcgattgccacggaacatttctcccgggaaaaacgcttgaaattcaatcatcggcacgacgatcccgggaaaatggcatcattgcctccgtcccggtctggaacatccgggctttcccgttccggaggggaaaagaggcattcttcaaggaatgccctgctcttttttaccgccttcgcgcatttgcctgatttcatcccggatcagggcggcgcgttcaaattccagatgggaggccgcctccttcatttccgcctccagcctggcaatgcgctcttccagcccgtacccggcctcgtcctccgctacgcggaaggactcttcatcttcttccgcatacaactttaactgcccctgttcggaccggctcaccgtctggggaacaatgccgtgctccagattgtacttctcctgaatgctccggcggtaatccgtcagctcaatcagccgcttgatggaatccgtcattacatccgcaaacaggacgcactccccgttcaaatggcgcgcggcgcggcccgccgtctgcaccagggacgtttcattgcgcaggaaaccttccttgtccgcatccagaatgcacaccagggagacttccggcaaatccagcccctccctgagcaggttgatgcccaccagaacgtctatcctccgggcacgcagggcgcgcagaatctccacgcgctcaatcgcgtccacatccgcatgaatgtaggaaaccttcagccccacccccttcaggtactccgtcaggtcttccgccgtcttcttggtcagcgtcgtgaccagcacgcgttcattcttggcaacgcgctcgttgcacagggcaatcgtctcgtcaatctgccctttcaggggacggatggtgatcttcggctccagcaggccggtgggacggataatctgctccacaatcaggggtgtggaacgcttcgtgggatcaaacttctccaccggttccgtagacgggctgggagtgacgcggatatccttgggggaagtgaacagaatccccttgaagccttccggcgccttttccccggacctggcggcgcggcgcacgggaatataagtcttgttgtccgcacggcagttcaccagctcaaacggccccggcgtagcggaggcgtacacgatctggttctgcctctccatgaactcatggaatttcaggggcctgttgtccagcgcgctgggcaggcggaagccgtgctccaccagaatattcttgcggctgcggtccccctcgtacatgccgcccagctggggcacggccacatggctttcatcaatcagggtcagggaatccttggggaagaaatccagcagcgtggagggggaactgcccggcaggcggccggaaagatggcgggaataattctcaatccccttgcagaagcccagttcttcaatcagctccagatcgtaatccgtacgcagtttcaggcgctgcgcttccaaaagacgcccatgcttttcaaaccatcccacgcggtcctccagctccgcccggatggccttaagcgccgcggcccgtttttccggagcggccacgtactgcttggccgggaaaaaggtgtaactccccagccgttcccgcacgcggccggaggtggaatcaatcagggaaacccgttccacctcatctccgaaaaactccacgcggatcgcctccccttccgaataggcgggaaacacctccaccacctccccgcgcacgcggaacgtgccgcgggtaaaatcaaaatcctgccgctcaaacaggcgttccaccagctgccggagaaacacgtcccggtccatgatgtctccctcacgaatgcgcagggtcaggttacggtaatcttccggggtggacaggccgtaaatgcaggagacggacgccaccacaatcacgtcccggcgcgtcatcagggaattcatggcgttcaggctcaggcggtccagctcgtcattgatggcggaatccttttcgatataagtgtcggaactggcgatgtacgcctccggctggtaatagtcgaaataggaaacgtagtaatccaccgcgttattcgggaaaaagcttttcagctccgagtgaagctgcgcggcgagcgtcttgttgtgggaaatcaccagcgtgggcctgttcatccgggcgatcagattcgccatcgtgaacgtcttgccgctcccggtcacccccagcaggccctggtgcttgttgcccgcttccagagacttgagcagcttgccgatggcctgctcctggtccccagagggcttgaaggaggaatttaattcaaaagacgacatacgcgaggaagccagtataatccccccgccccgccgggctaggacaatgtttgacaattcccccctgctgacccagtatatgcggcatgtacattcccacgcaggaagaacggtatgcaaaaaaagggttcgtctccctcatcctgtgcgtcgtggtcccctcctgcctgtacgtctcccttctatccaagcaactgatgatggtgcgcggacatgaatgggaagccatcatgaaaatcttcctggcgttcacctatccgctggcggcgctctttgccatgacgggcattccgttcttctggtggtccgtgggcatctccctggcggtccacgcgggaatcgtcatctggctgaagacggctccccgcctgtcgcccaaaaaggccatctgcatcgccctgtgcgtgggaatgctggatttcctgtttgtgaaaatattcccctttccggcgcaaatcatgggctgaactgccctgcggaacgcccggaatgttccgtcctccggttcaggactgctttttagccagggcaataatctgcctcttgatctcgcgcgccgcttttttggaatccgcctggtaggcctcatacgtaaagcactgcgccccggagccgtcgctggcagtcagcaccagcttgggacaaaacttgcccttttccagggcctccttcacgggagcggccaccgtggacttgcctcccttcaccgggagataaaccagcacgcaccgttttcccacggcttcaagaaacccctccgtcacgccggcggccagcgggcaggtggtggccgtgtttgtataaagataggccacgggcttcttttgctcctgcgccgttttcagcgcctcttccatccggtccgtggtgaaagtgcttttgggcagcctgacatccgcccgtgaatggggagacgcggccagaagacagacactcaacagggtaattaacagtttcataggccgccaccatacgggcagccctggggcatgtcaaagacaaagcccccctgtttaatcttgaacgccaggtcacggtatggcagagtgcgcccacgcattcgtcgcgcctgtggcgaaattggtagacgcgccagacttaggatctggtgttgaaaaacgtgcaggttcgattcctgtcaggcgcaccatcaataaccctctttaagtaaacaacttgaagagggtttcttttttgtgctgaaataggcgcgaattctataaaacggccccaatctgtgtacaaagtgtgtacactttcaacccgtttttagccttattttacaaggtatttctgtcataagaatcacacaatgaacggctcatttggctgccttgtaaaacggaaatcttgcgagttatatataattgatacaatatcaacatattgtgttaatttatgtctatctacacactccaccatcaggagaggcggctggatgaaacgctctgcggcaatggcaggaagtactcgaccggggatgttttgttctcaggtgaggggaaacgaatcgttctgggaaaacccattgcggaaggaggtgaaggttccgtcttcacttcccatgccgcatcggcatcaccactcgtagccaagctctaccatccgaaccaacggatgcgttggcgtgagcagaagcttcggctgatatgttcccggcctattcgttccccgtgcgtggcgtggccgcgtgagatcctgtacgacgaactgcggcgctttgtcggcgtactgatgccccgggcggacggtgttccgctcggggcgttcgcgtttcatgcggagctgctgaaaaaacaattcccctcatggacccgttacgatctgaccaggctatgcctgaacttgtcggcatccgtccacacgctgcaccgttacggtgttgttctgggcgatctgcatcccggcaatgtgctggtttctactgatggctccgtccattggactgatgccgacagttttcagatcgaagactatccctgttctgtcggcacggaacggttcctggctccggagctccacggcaacttgggagactttctccgtacctgcaatcacgatacctacgccctgtccgtcctgctcttcatgacattgacgctcggcctgtctcccttcgcccgtcaagggggagaaggagacatgcgggaagccgccaggaagggtgcactgccatacccgtttgcttcgtacagacctccagcgggattctacccgcccgatacccccggacgttatgtctggtcgtatctcccccgcaagctccgcgacgcactcggtcacaatcttacctgtgtccagcgtcacgatttgcgtccacgcgccatgccggggtatctggcgcgttgtttgctgcaatacctcagggatatggagccgggaggcggaagggatcatcccatgtaccgggatcttctgtacgaccgtccctgcccaccccgaagtctgctggtacagatgacatccaacatctgtgcggactgcgggattcgtttccgggaggctcctgacgatgtcgcccggcgtttacggcaatctcatactcgccccctgtgcaggctctgcatacggcgtcgtagcgcattgaatcaggcctcccgaaatacaaccatcaaccattaactcgaataaaccatgtctatatcatcatcaatactcccaaccagacaggaacaactcgccgccatgtgcgagttcggcaacaacaccaacgcccggcttcccgttctctttctgctggatgccagcagcagtatgaacggcattgtccggggcgacaaccaacacatcctccgtcaggagtattctgacgggatcaactggaatatcgtcacgggagacaatatcgtcacccggatggatgaacttaatgccggccttcaacggttcatcagcgagattctggccgatcctctggcgaagctggccgctgacgtagcagtgatcacattcgcccgtacggtagcaacagtaaaggagttcggtccgatccgggaatctgacacaggcctgaagatctccacgtcacaggagaatgaaacgctcctgggtgaagccgtcgaattggctctagctgaactcgacagccgcaagcgtacctaccgggcacacggggtggaattctaccagccctggcttgtcgtgatgacggacggggttccgaccagcgcccggcaccgggagctggaagaacgattgaaggaactctcaacttctcgtaagctgagcgcgttcgtcttcggtattggacgcgttgacttgtcggagctttccagcatcagcccggggcgtgctcccatgcaggtcaatgagcagaagttcccggaactattcgcatggctgagccggagtgcccgcatggtcagcatgtccgtgccgggcgacggggtatcgttgactccgctcccggaagatgtgtggcaggtatagagtaggtgaaatcagaaagtcttccgaatggagggctttcttttagatagcccacaacatgaatggtgttatctccactatttcaagtttatgcatttttctaaaataacggtcagagctgtttcaagaaatcttcccatcggaatgatgcctcttgatgaaagtcgtcggacgatgtgagctttgagctttgcatgcatgccggttttgctatactccattgggcttgttgttccagaatgactgctgttattcgggttgcaatatggattgatcgaaaagaagacaaggtatgacccatctgccgacagaagatgaaaccccggttcccggagagttgttattgtatacttctccggatggcaaaatccgtctggatcttcgcatccatgatgagacgttgtggatgactcagcagatgatggctgaactgttccagacaagtaaacagaacatcgggcagcatgttgcgaatatcctgcaagaaggtgagcttcaagaggatggaactgtaaagaatttctttacagttcgattcgaaggggaacgacaggtgaaacgttctgttatcttctacaacctcgatatgatcatttctgtcggttaccgggtgaatagcatacggggcactcaatttcgcatatgggcgacccagcgcctgaaggaatacatgatcaaggggtttgccattgatgacgaacgcttgaagaacccgccgattcccggaacgacaccgttgccggactattttgatgaattgctcgagcgtattcgggacattcgtgccagcgaacggcgcatgtacctgcgcatcaaggatgtttttgccatggcggctgactatgtgccgtccggaaaggaaacgacggagtttttcagctcgattcagaacaaactgcactatgccattaccggacacagtgctgcggaattgatgatgatgcgggcagacgcatcagcgcccaacatggggttgaccagctgggttggagaccgaatccatgtcagtgatgttacggtcgcaaagaactaccttaacgaggaagaaatcagcgatttcaatcgtttgacctccctgtgcctggactttgtcgaggatcaggcaaagaaccgccgtgagatattcctgcatgagtgggaagacaagcttaacgaactgcttcgtctcatgggaaggcgtgtactgaaaggcaaggggcagcggtcaaagaagcaggcccagacgcatgttcgggggcaataccggctctatgaggaacgccgcaggctggaggcggaacatcaggcggaacaggattatgtgaaagaactggagcagaatatcaaaaggctggagaacaagaaaggccgcaagtaattttcaattccaggccgttaaaagcttggggatgtgtggtgtgttttttccgaaagaacgcgtcagcattctattcccacactttttgatcctctgtcacctattattgacaatggattcttgatgcatcgtcattcttgagaaacaggtaattcctgtgcccgtttctgtgccatgttcatcaggaagctcatttgatccgtggagtccttactgataacatcattcaattcccagaaaaacgctgccactagcgcatcattgcattctttctgaatcctgtcttccatggcagggagcaatagttcttcctccctggttccaaccggataggcggcaatgacattatcagtgatatttgacaggggcaagatgacttcgttgagataccccttattcagttcatcacaggttgtcccccattttttcatcaatgcatcatatctcttcccgatgatgtcgaggtaatccatggcgtcattgtaggtcgcaagggacaatatctccttttccagctcctgtttcaattcatccatctccttgaggcactggcgttgcactgtctcgacttttcgttcgtattccttcgccttgccaaggtagtcatccagtttgtagtaggttcggatttttctgtacagggcgtccttgaattcctgagatggcctggcggcccattgaccgcccgtattgaacgcggatggagaagtatcagtccgggacgattgttgccatagccatacgccggcaagtgcgagaatgatgacggcaacagtgactgcgtaggaaacggattttccggaagctcccgttttccgtaatcctccggccttcccctgttgcagccattccttccactgaccggctgtctggcaacgctcttcaggactgagccgcaggttcctgtcaatggatgccagcaattcccggggccatggctgggaaagagccatgcccgagagcgggacgacctcatcccgcatcagcctcctgtcggccggttcgacggaaattcccgagatcaactcgtaccaggtagcggccaacgcatagaaatccgtccatgggccgattgctcctttcccggtgatttgttccggggaggcgtaggcgtacgagaattctccctgagtaatcgtacaggtcacttccggcttgttgagcgccgccccgaagtcgatcagcacaggcaacccccgttcgtcaaagaggatgttgccgggcttgatgtcgcggtggtagatccccttgccatgcagatagtccagaccacccagcaggagcagaagccactcggcggcttgctccagggttatagtgctcttcccggaagcggcttcgtccatacgttcccgcagcgaaccgccttccagccacggcatcacatagaagatgctgccatgggactcgaagacgtcgtagacccggacgatgcgttcatggttcagggaagccagcgtttgcgcttccttgcggagtgaatccatagccgtccggtaagcctgccgggacgtatgaggcaacgggatgatctctcccgtatccgaatcccggctgcacaaccccagggggaaacattccttgagaacaatgttgcgcctgagctggctgtcccaggcgatgtaggtgatgccgaagcctccctggtccagcgccttgagcaacttgtaattgcccagcagagatcccggaggcaatgcgaagccggaggcgtccatacaatcaggcaagcgggggattgccgagcctcggcacttcatcggctaggaactctttcagggtttttccctgggcaaaggcttttttctcaagaaccttgcgggtatccgggtcgagcttcagggtaatcagcgtctcctcttccacctgcacccggctcgggagagtcagcgggagctgcttgatgagttcccggatgatatgttccttggcggcgggaatgggctttttcgccatccagttgcggacggtcgcttccgtcacgaaacatcgttcggcgagccatgcgtagtcgaaaccgttggccttgagccacagcttgacattcattttcaactcatcctgattcactcccgccatgtttcggaatgtagcactatcgctcaggaatggcaatacggttatataacatccctatttttgagattaaagtgagattttcaggttgactaaaatcgtaaaaaggagatatacaggcaatgtaaacgagatgccggcaatgaaaagtatcatccagttcacctgtccccagtgcggaggccatcaactgatgctcgtcgaacgggccatgcaccgttatgtcgtccagagtctggaggccgatcgtcagggagggctgtctgtcggacacaaggttctggtggacgatttatgcggagagccgctggggtaccgctgcgcggactgccgtcatccggattgccatgggaatgattcatcggaaggatttcaatggcattccctgaaggaggtgcaaagcgccggagccattgcctggccggacggaatggaaacggtagagcaccggtgcatggtttgtttccccgacgggaagatgacgcctgtgatcgtcgaggtcgttcatcccggaactctcaccgagaaggaacgccgcaccgttctggaacgggagcaggcagcgcatggcatcctgatcagccagtcggattccgggattcgaacgttggcctgccacaactggaagcgggttaagaagcatattctgcaatcaataaccaacgacatgtaatcacatgaagagaaatgaaatatataaaatcgggttagcgactggactggccattgtgaccacctccctattgtcctcctgcgccatccttgtcgggaagagcgctcgggaacttagcaagactgaaccaggcagggagattctgtttacgttgatttgctccggattgtttggttattcgatcttcctggcgctttactggttgtccgagcataaagaaccggctgcaatcaaggacttcaagacgattgccattgtattcgccgtggtcgatctcatccttgccgtgatagactccggttttcttgctttgctggaattggcggccattgtcctggttgctcataaagttctgaatttcacactgggcaaatcattcggggtattaggcatcagtatggggatttctcttgtcggaggttttctggcagcagctattttgggtgtagagatatagaaacattcgtacgtcactctttgtggtattttggctctaactcttttcgcgtcttatcatgcaggcaaaatcctatccggatggaattaacacaaatacaaacataacaatgaatacagtacgtcaaagacaaagacttgggataaaaagaagcattcttactgctctgttgatgggattttgctgccttttttatgcccctgaggcgttctctcaagatgagcccggcgctccttcgcagagaaccgcaatggatgatgactttgacaagtctatggcgcaggcgaggcaacaatatggtaatcgcttgtaccagcagtacatgggaggggccactacagccaaggaacgtgctataggagtcctacggatggagaatgctattgctgaagctgagggaaagggagatacggcccaagctaatgcgttgcgccagcagcttgctatggctcagagcaacaatgaatggtcgacaggtcatttacagcagaaagctaatgccggggatacgagagcacagagagaactggatgaatactacgcattcatgaaaaccgtggaaggttcttctcctggggaggcgtttccatccctcatcagcatcatctccggtctattgttgtacgggtatattgtgctactttctcccaaggatgctacaataaaccggaaaacattgatcccgtggtgcgttggtctggccatcttcgatatgcttggcaactgggtgaaccagtcatggctctttctcttcgttgaaatcctggtcatccttgtagtcgcccggaatttccaatgctcatggaaacgttcctttgccatcctgggcctcatgcttgtttcaatactcattctgggaggactgttgccattattcttctgatgcgctttctctcgttcagttcatgaatctacactttgatgcttatgatttcctattaccttgctcgaccgggcagcacacaggaaggacctttttccgaagacgagctaaaagggttctatcatcagcggactcttccccccgggtcttacgtctggacagaaggatgggatcaatggcgtccctgtgaagacgcctttgaatggtttatttccagcgccaagctgccgcctcttcctccacattccggttcagaaggtacgacatcccattcaaacacatcgtctgctcatgcggaacaacacgagaaagccttttctccagatgaaatgaaggcatcgacggcaaaggaatacaggtccttgtcagattggatgcagaaccatgaaattctgaatcagatccatcgatggggattgaagaaactgaatataggctataaatcatggaaattgagctattacactgcaataggaacgggcttgttttttctgattttaataggaatgctgaatcatagggaaaacaatgatgatatagtatcctgggaaaacgctagaacacaaaggcaaatttcgaatgagctccaagatcaaagattacgccaaatggcacaacaagcgataatgtacaataacagaattcaggcagaacgtgaagccaataaaattgagacctgcaacagatgcaggggagctggaacatgtactgcgggggcaggtggatacaatatgaaccggccaattattgtgtgcccaacctgtagcggaacaggacaagtaagacattcaaataatccaggtccatgggcgctttaaaattatgaaaaaatatattacactttttttacttttttcattattcctgtcgtcttgtgataagttaacatcctcagataagcaagaaatagataggcaagttgcccgactatctcctgaaaaagaagcagattttgttcttggtaaaatgttgttaacgatcaaaaacggaggagatattaacgattgtgagacgaggtatccttatataggaggatcatgcgaatatcccacggccttgcatattgctgtttatcagagaaaacctcaaattgctgagcttctgttgaaacttggagcagatccgaatgctcatatctctaaaaatgaaatatccgcattgcataacgctgtctttacggatcagtatgatcttgttaaatcattgctggatcgaggagccaatcccgatgaagtaggaaaacatacctcttcactattgggagacgcctgctctcgatatcgagaaagtccccaaatagcaatagagttaattcaaagacacgccaatgtccgaatcacaggagttgatggtgcaaccccacttcacgatttagtgaagcgttcagactccgattatacctcagaatggggaactgtctttgatcttattattcgaaatggagctgaagtcaattgtcgtgatgcgaaagggaaaacgcccttacatgaggtagacaacttacacatggctaaattacttattgctaatggggctgatattaacagcaaggacaacttgggaagaaccccattattttacatcaaaaataaagatattattcaatatcttatagagaatggagctattcttgatataaaggataaaaacggagcaactattcttcattatatattatcgcaagactttggagaacttgaatattttagagggcttaaattcgaagccgatcgaattaaatttattacagaaagaggtattgacgtaaacattcaggatattgatggaaatacgccattacatttaataatgagagaaccttattgtgaatatatttcggaatggggaacttatgacaagttcggagcggatgatttatttccactgctagttacaagccaaactgatgtaacgatcaagaataagaaaaacaaaacaagtttagaactggcatattcaatttctaaagaaactggagatcggttaaaggaaatattaagagaaaagaataagaacggaaataccgcacctatggatgttgccaacgaaggagatgcgacacaagtgacatatggagacaaggaaccacttagcagagaacaaatcaacgcaaatgcacttagagaagagattgccagacgtgatgcttctttcgaaaattctccagcaagacgtatggaatggatgcgaaattcagaacgtcaaaacatgctaaatgaactcgcacgacttgagactgcaaaagcgaacgtcaacatgcagattaaagaaagagaaccagctcttatgtcggctgttgatgagcgacatacggatagtgtaaaagcattacgggaagccgtagcaaacgcgaaaagcaaggatgaagggaaaagaaaagattccctttcccccgaggaggctcaaaaaccagtggttttgcaagacatatcgtccggcaaccttaatgcaggaaaaatgtccatcgccaacattaaacgggctctgaaggacgcaaaagaggatgatcaactactacttaacgatctcgcttccgtcgttaccgacctttataggtcaaagcaagagatatccctggttcgtaaacagaacatcaaagatgaaaagcaaatatccagccttgaatcatgggctgtctcatgcatgacccccaacgctcttactggccgtaccgatccggcaggggcggaaaacgccaggcgtaaagcccggatacttgagggagcaattcaacaaaggaataccgggattcgaaacaagttgaatgctctcgccgacagagcccgggaattggagtcaaagttgagaaataatggcagagcagaagatgccgacatgctgaagaaaagcgctcgttattttctacaagatctttgagttatctagtactgtcttcagatgataccttgccctctcccattggcttattcgtctcctaacaatcatgatgacataaacgttacggaagatgggagcaagagcgcgtcgttgcaataacacctccctcaccgtcatatataccagacacgggaatttacccgcctgtcatccttcacaacatgaaaataatgaactggaacaatgttttcgcctgtacttttgttgcatttaccttacccatttcggcgttatccgacacggaaccgttacccgattttaacgtattaaagaaacaggctgaagagggggacatggaatcccagtttcaactgggcagatgctacgctttcggcacaggaacggacaaaaatggtaagcaagctgctctctggtttcgaaaagcggcggaacaagggcatgccaaggctcaatacaatttgggagtagcttatgcgaccgcccttggcgttgatcatgatgataccgaagctcgcaaatggttccttaaatcggctcagcagggatttgcaaacgcccaattcaacatggggctactggaagctaaaggaacttcaggaacaagaaatatggaacaagccttcggatggttcctgaaagcggccgaacagggattgcctcgtgcacagtttatgactggtctcttctattcttccggagaaggatgccggaaagaccacgatgaagccatgaaatggatttcaaaggcggcggaacaaaatgatacggaagccttgttatggctgggtgattcctacgccttgaatgatgatatgaagaaagccttttcacattggaagaaagcggccgatctcaatcatcccaaggccttatatattctggcccaatgttatgaacaggggaatatggtagaacaaaatgaacagcaagctttcgagttgtaccggaaagcggcggaattgggtcatatccaagccatgaataccctggcactttactatcttaacgggaaaggaggaattccgaaaaatcctcaacttgccatttcctggcttacaaaaacagcggaacaagaggatgcgtatgcccaaaacttgctcgggatgggatatttatatgggttgggaaatattccccaggatctgcaactgggggcacaatggacactccgggcggctcgtcaaggggttcctgaagctcagtcacgtgccggtagtatgtatttcacgggtatgggagttgaaaaaaatatgaaaaaagccgtatcgtggtgggaaaaagccgtcgctcagggagagaaaagagcccaattcagtttaggtttatgccttattgatggaaatggaatcggaaaggatccggaaagaggaatcaaattgattgaattgtcggcgcagcaaggagaagtggctgcacaacattacatggggcttttttgtgctcagggaacatttggcatgaaaaaggatatggaaaaggctatctcctggtgggaaaaagcagcctctcaaaataaccctgcctcactatgtattttggctcaaattatgaagaaggcatccataagcccaaaaatgaaaatatgtttattcaattataccgcaaagcggcagaaggtggagacgccattgctcaaaatgctctcggccacttctacacgaacggtctttacggttttcctaaagacccgaagcttgcctttcagtggacgcttaaatcggcagagcaaggtaattccagtgccatggtcaatttggggtatttttatgaagtaggagatggttcaaccgatcccaaacgcgtatttgacaggccttacggtatcgtacccagagattacgacaaagctgccgagtggtacgaaaaagcagcggttcaaggtcatgttcgtgcgcatttttaccttgctacaatttacaggctcaaatcagacgatagaaaatacatggaatatcttgccagggctgcgaacctgggagatccggaagctcaatttgaaatagcgaacacttttcaaagtatcggcgatcgtaaatccgccgtgacctggctcatgaaagcagccgagcaaggatttaccagagcacaagttaatcttggctactgttatgaaatgggtgatggagttgccaaggaccttgataaggcggccgaatggtacaataaagctgccaatttgggaaacggggaagcaaaatacctgttgaataaacttaaggaacaataacgttaggaacatgatttcatttagatgaaagacaaatcaaatcgctggccccggagtgccaagatcactgtgtgggtgctgggtgttttgctcgtcgcttcattggttactggctttatgttgtattctggacttatggatacagcatacgatcctaatgtagctaatccttgtgacataatttattgacatccagcaatacttcgccgctccaagttcccggtgtaattatcccacgccccggtacagagcactgtaccggggcgttgattttctgaacaactcaaagaaaggagattcttatcatgaaaagtaaaagaacgccgacaatcgaagaagtagacgagaagcttcaggagatcgcatacggacccgccaaacgtccgtggccccggagtgcgaagatcactgtgtgggtgctgggcatcttgctgttccttgccggtgcctatgttgtgcttgacgctacaacagtgccagcaggggactatattacggacgaaggtgacattcatctcctcaacagactcgtaccggaattgccagactccaagcaagccccaacaaaaacggtaagagaattgtaatctcgtcagcaacacccagctgttccacacccggagcggctgggtgttgcttttcttttagctcagtcataaatactgttcatgagatcttcctactggcatcagctgaccaagacagctactacgattcatggttccgggtacgacaagttcatgtccactttcccgggacaacgggatatgaagctctttctcatctgaaataacaccttcccctcccgtcatatataccagacacagggatttacctgcctgtcatccttcgaagagccgccatggtcccatcccggggcatggcggtttttctgtatccatccatcaacaacgaaagaaccaccatcatggctatcaaactcatcgccaactacagcaaacgactcggactgccgggatattcctcccaccagttcgaggtctccatcgaaaccgaaatcacccacacatccgaactggctgcggaaaccgagcggctctacggctcccttcagactgccgtcgacgcccggatccaacaggtcgggttcgttcctgacgaacattacggctcacaggtcacgcaaaggcctgcccttggggcttcctgctcacagatgatatccacatcatccgtgaaacaaacaccgcctgcaagcgctcccgagacctctgttgcaaccgttcccacatggaagttctcggagaagcaacagtctctcatcctggaactggccgggaaggccgggttggatgactctgccctgaacgaactggcttcccggagattcaacaagtccgttgccatgctcaaccgcatggaagcctccgggttaatcgacgaactgatgaaccgctccggtgcgacattcaaacgttcggcatcaggcaggaacaactacacccgccgtcccgctacgacctatgccggtaactccaacccgtactgacctatgattgctcccgtaacctgtcccatacgttcatcctccctgcacccggctatcgcattggtgaacaaatttccttcggaggcttcttctccttctgccatccgcccggactacctgtctccctcctcggtcaaatcgtatctgtcgtgttctctgcgcttcttcttcgagagggtagcacagatacggaagccgacgacggttgccccgcatgtcggcaaggccatccacgccacactccagtccttcaacctcgcccgatggcgggaagaggacagtagtgagacggccatggaagaagccttctccgcccactttctggagttggagaagacggaaggcccggtggactacgtcgacgaagaaacgagacagaagatacgttcctgcgcctttgaccacgaactccagctggttacctatcagatgatgatcgaagaagccacgggagacacgcctccgtcgctggatctgatctacctggtcaagacgaagatgccccaggtgatccgggtcaagattcacccagccaacgaacagcgcaagcaacgcatcgccgacttgtacaggattgcctgtgaaggcatcactactgaacgtttccatccccagcccgggatgcaatgctcctggtgccagtacaggaaggaatgttccgggtggtgcaggcagtaaagggatggagatgctgtcgattcagaagcctgccatcaggtgtggctggcttctttttagctgtcacatctatatttcttcctcatcagagaagaaggaaggagtcagttccagaagctggtaacgattctttctgactcccagattgtattccacaagaagagaaaccaattggtcgccgtcaatcaaatcgatgggggtatgggaggaggtgcgcctcgcttcatccctggcgcctctggaaaaattggaagtcgtcacaatcaggccgcgttcgtccccaagctgccgcgaagttgctggacgacaggagactgcacattggctttccatcgtttggcctgtacggccagcttgatatgaatgacatcatgtaccgtcataatgcctcgcacatcaacgcccccgtctccgccatagggagtcctgctcacttcggaaaatcccattttactcaacagagtagtaatcaattcctcaaaatcctgcgggtttaattgcatcatccgttccatcaggacttttctttgtttatcattgaacgaatcaatgtgacgttccaagccggttgatttccagatggtcaacccaaccattccattgcccaacttttcgaagcgggggatcttcccctgtttttctcttcgctggatttctgtcaggatttgcgcgtacatgctggcctcgggagtcagcccttccgtcttgagccaccccaactccagggctttgctggtaatatccctgtagtgcatgggggcattccctgaaaagtgaaggaggactttttccgcacagtccgaaaaagaataggaacctgctgacttctccggttgtttccttttaaccgcttttcctgccttttcccctgagtccgacaattcgattttcacgttcgggttaagcgcaaagagcccttctgccgccttgatgaaccgggattgatttccatgctttttgatatcctcatagatacgcgctccgactgtagcgtcgggagtctttccttgagattgccacattccccgttggatgagtgcagcggcaagttctttaggacgcatgggagatacagatttttgcagaagtaaataaacggaatcaagaaggcggctcatctcaggaattgtcataggttaccatcctttccggggcgggcaatctcttttatctctgcttcccgtttatctgagtacgatccgtaccgaataggtcagcatggggccgcatgattgtgcatccaataagtgcggaacaaatttttgatgaaatactctgaatgagatggctggataccgctttgtatggtacttgtctctgtagttctacatctgtttcatcttatgcccatcaaaaaaagccaaatatactcttcactctggtctgcctgcgacgaattgcgcggcggtatggatgcctcccagtacaaggattatattctgactctgttgttcatcaaatacatcagcgatttacacaaggccggacgccggtccctgatcgtggttccccggggtgcgagcttcgatgacatgtatgccatccgccacgaggacgatctgggcgacaaaatgaataagatggtcgagaagatcacctcggccaatgcggggatcggcaatatcaatgtggcagatttcgacgacggcaacaagctgggtgacgcccgagagaaaaaagagaaacttgccagactacttgctatcttcagccgtccggagctggatcttacatccaaccgtgtcgatggggacgatattctgggcgacgcctacgagtacctgatgaagaacttcgccacggagtcagggaaatcgaaaggccagttttatacccctgccgaagtttcgcgcctgattgcagccgtcatcggcatgagtaaccgccctgcggacggcgaaagcctggtgactctctatgacccggcatgcggctccggctctctcctgctgcgggcggcagaggcttcccctgtcaaggtatccatccacgggcaggaaaaggacggttccacagccggccttgcccggatgaacatggtgctgcacgggcaggataccgccgtcattcacgatggcaacacgctggccaatccgcgcttcaaggacggagacgtcttgcggacattcgactacgtggtcgccaatccgcctttttcgcaaaagaactggatgacggggttcgagcctgctgccgatctttatcaccgtttcgaggacggcattcccccggaaaagaacggagactatgccttcctgcttcatatcatcaagtccatgaagcccaagacgggcaagggcgcgtgcattcttccccacggcattctgttccggggcaacgcagaggcggatatccgccggaacctgatcaagagacgcatcatcaaggctatcatcagcctgccgccgaatctgttttatgggacgggtattcccgcctgcatcattgttctggacaaggaaaacgccgccgcccgggatggtattttcatgatcgacgccagcaaaggcttcatcaaggacggcgcgaagaaccgtctgcgcgagcaggatatccagaaggccatggatgtcttccatgaatgtcaggagataccggggtactcccgcatggttcccttggccgaaattgatgccaatgactacaacttgaatcttccgagatacatcgactcttcgaatgatgaagtgcggcagaacctctttgctcatctcaacggggggattcccgatgacgatctccgggagttggacgattattggcaggtattcccccagttgcgtacacaattattttctccgtccgttcatgtcgggtacagtgtattgaatgtaccgtccggaaatatccgttcgttgattctggaaagtcccgaatttcagcaattccgcactgcggtggaaaatcgcttgtcgcgttggatgcagcagacccgcgagctcatgatggggctccatgtcggcgtgcatgcgaaggacttcattcgtacgctgggcgactcgctgcgcgaactcttccacgacatgcaccttgtagatgaatacgatgtgtaccagcgcctgatggactactgggaagagccgatgcgggatgatgtctacctcatcgcggccgaagggtggatcttcaagaccagcaacctgaccaaaacagacaaaaaggggaaagaaaaaatcacgggatgggaaagcccccttctaccggagaccttgctgcaacagcacttcttcccggatgaagtcgaggagcttcaccaaaaacgactgcaagccgaacaaatacagacagagcttgattcgcaggaagaggaacaactgggagaggacggcttcttcttccagtgggaaaaagtcgatcttgcggcattgaaaagccgtatcaaggagatcaaaggagatttgctgagagcagaagaactggccttcctccgggattttctcgcccggaagacaagcgtcaatgaattgaaatccgacatcaaaacgttggaaacgaagctaaaccttcgtactcggcaggcgtgtgatgctctgaccgaagacgaggggaaaatgattgtcgtgaatcaaaagtggttagcgtctcttcgttccagcatccacgaagatgcggaacgagtgatgcatacgtttgcgcagcagttgaagattctggcggatcgttatgctacaccgttgccggagattgagcagaacgttgttgaactcaaggatagggtaaccgcccatttgcagaaaatggggctgacatgggaggggagtcagagatgagtagtattcccaaagggtacaaaaaaactgaagtcggggtaattcctgaagagtgggatgtactagatattgatcatatcactgataaagttggcagtggaataacacccagtggaggcagtctcgtctattcaacaaatgggcatccgtttattcgaagccaaaatgttggttggggaaatttcataatggatgatatagtttacataaatgatcatatacataaaaaacagttatctactgaggtaaagtggggggatattttacttaatataacaggagcctcaataggtagatcttcggttgtgttacgagacgatttgattggtggaaacgttaatcaacatgtgtgtattatacgtttatgtgatcaatatgattcaaaatttgttaatataaatatattgtctaatttagttcaaaatcaaatcaaagcatttcaagctggaggtaatagagagggactcaatttttcccaagtaagagttattaaaatgcctttccctccttcttctgaaaggcaagccattaccgaagttctttcggacatggacgcgttgattgaagcgcagaaaaaactcatcgctaaaaaacgggacatcaagcaaggaaccatgcagtatcttctttccgggcgagtgcgcctcccggggtatgaaaccaaaggctggaagcatacggatattggagatattccggatgattgggtggtgaaaaagttaggagatatttccgacttatatcagcctaaaacaatttctcaaaatgaaatgcatgactctggtccttatttagtttatggtgcaaatggtattataggacgttatcacgaatacaatcacaaagaatcagagattatgattacatgtcgaggaaatacatgtggcacaatcaatatatcatctccatatgcttggattaccggtaatgccatggttgttcgtatacaaaataaagaatttatagataacaagtttatttcatattttctgaaatacacttcacaaattttaggatcaattacgggtggagcacaacctcaaattacccgtgaacctctgaaaaaattatggatttattgtcctcgtttttccgaacaacaagccattgcgcaagtcctttctgacatggataatgaaatagaaaccctcgaagcggaacttgagaaacttaaccacatgaaacgcggtatgatgcaggaactgctgacgggacgcatccgcttgatctaaatacttcttctttacaccatcatgcaggacgacacatacaacgaactcggggcagccgaacgtgtgacacagaacaaggttgtggccttgttccgggatcatctgcaattcacgtatctgggaaactggaaagcatctccggaaaatgcccgcacgtctcccatcgaagaaggtttgctgcgttcctggctggaacggcgcggaggggaaagtgctgtctatgctcccaaaatcattcagacattgaagcgtgccgcttcgaatccttcctgttctctctacgagacaaacaaggctgtttattctctgctgtattacggggtggaaatcaaccgcgaggtgggccaatctcacaccacgttgccccttatcgactgggatcacccggaaaataacgaattcgccgtagcggaagaggtaagcgttcgccgggctgacggaaagacgacgcgccgcccggatgtcgtcctgtatgtcaacgggattgccctggccgtactggagctcaaacgcggcagcgtgaccgtgaatgaagcgatccggcaaaatcagacaaaccagcacgagggcgaaattccgcatttcttttcgactgtgcagctcgtcatggcagccaatgagacggaagggctgcgctatgcgacgactcaaacgccccccaagtattacctgacatggaaacgcgatcaggaagatacgccagtcaaccatctgctcgaacaccttcgggaactttgctcacagaaacgcctgctggagttcatccacgatttcgtggtctatgacgccggcatcaaaaaggtggctcgcccccaccagtaccggggaatcaaaaagacacaggagtacctgaggcggcgcgaaggaggaatcatctggcatacgcagggcagcggcaagagcctgctgatgatctggctggcaaaatggattctgcgcaacacccccgattcccgtgtgctggtgattaccgaccgcacggagcttgatgaacagatcgaccgcaactttaaccaggccggaattacctcttaccggacaacatccagccgggatctgttcgccaaactcaaccgggcggaagaacgcgtcatttgctcactcgtccacaaattcgggctgcgcgaaggagatactgatgacatcatcagagaatgggatgatacgattcctgccgatttcaaggtcaagggcgacttgcatgtcttcatcgacgagtgtcaccgcacacaatcgggcaagttggcgaaggccatgaaaagactgctgggctcgggtatcttcattggttttacaggtacgcctctgttcaagtcggacaaggaaaccagccgggaaaccttcggtaatttcattgatacatacaaattcgacgaagcggtcaaggatggcgccgtgcttgacctgcgttacgaagctcgcaatgtggatcaggatttttctcccaagggagatatcaaactcgatgagaggttcgaacggctgacgaccggcatgacggacgagcaaaaataccagctcaagcaaaaatgggggacgatgaaggccctgtacagcagccgggagcggctggaacgcatcgccgccaatatctgcgaggacatggatcgtgatccccggctgcgcatggatgccggaaacgccatgctggtcgccgacaatatttatcaggcttttcgattttacgagatttttcaacgaacggaattgaagggtaagtgtgccgtggtcagttcgtacattgcttccaacgaagcttcgcggacagcaggcttgggggcagcccagcaatccgaggaaatgctcaaatatgagacctgccagcagatgctgaaggatttcggctttcagacggcaagcgttaccgcctgcgaaaaattcgagagcaaggttaaagaaatgttcatcaaggagccggggcgtatgaaactgcttatcgtcgtcgacaagctcctgacggggtttgatgctcctccggccacctacctgtatatcgacaagaaaatgcaggatcacgggctctttcaggcgatttgtcgcgtcaaccgactggacggcgaaagcaaggaatttggctatattgtcgactacaaggatctcttcctgagtctgggggaagcggtcaaatctttcacggcggaggccttcgagcattatgaatccgccgatgtgcaaggactgctcaaagaccggctcacagaagcgaacaaattgctgatgcagcgcctcgaccggttgcgtgctctttgtgaacccgtcgcggaaccgaaggggcaggatgagtatctgtcctatttctgtatgggcgaaaacctggaaaaacatcaacgccaacgcatcgaactctatacgggaacggcggctctgatgcgagcctatgccaaagtgtgcgatgagcttgatctggccgggtacagcaaggaccagattgttttgctccgggaggaggtcgaacactttattgatgccagagatgccgtaaagcgtgcaagtggcgactacatcgacatgaagatgtatgaagcggaaatgcgcaatctgattgatacctatgtgcatgcttcggacgcggaaagcgtctctacgatggaggatatgggaatggtcgagctgctggttacccggacggaagaaatcatccgcgacaccgaaaaaaagacgggcaagcacgcggcggagagtatcggcaacaacttgaaaaaggagattacggagaaacgttcgctcaatcccaaattctacgacagcatgggaacgctgttgattcggctattggaagatcacaagaaaggagccatcgagtacaaggattttctggatggcgttgtggaactggctaaaaagataagaggcggagagcgtccgcgcccgcaaccaatcaatacgccacggctcaaggccttgtacgacaatgcccctgttccgcgcaggcatgcagaacgattcccggagcagtttgcactgataatggacaggaagtgcgccggaatgcaggcgggatttaatgaccccgtttcgacacgttatcgtgaggctttcgtcttgattcgggaaggaatggaagaactggctggtgaattcgatctcgatatcaacgaggaaatgatcgagactgtcttcaatctggcggtacaacattacggcagatcatgaaggtcggcggcattaatgtgcgcatcgtaaggaaaggcgtcaagcacctcagactgtcggtatgccctccatccggtgaagtcgtaatcaccgccccgctggcgatggacgaggatgccgtgcggttggccgctgtgcagcggttgacctggattcatgcacgacgcagggaattcgatgatcaggaacgccagagccttcgcacgtatgaatcgggagagacgcattactttctgggtcgccgctatcgtttgaaggtggttcatatccgttcaggagaaccccactgcatcgaacccaaggggaaattcttcgtgatgaacgtttacgctgaaacgacccccggcaatcgtgaagagctcctgcatgcgtggtaccgtcatcaactgcgggacatggtaacgcccttgcttgtcaaatggtgcaaacgccttgaattgacggtaccagtattcacgattcgaaaaatgaagacaaagtggggttcttgtgctccggatgcccatcgcatccagctcaatatggacctgatcaaaaagccgcctttatgcatcgaatacgtgattttgcacgaactgattcatttctttgaagcgaaccacactccccggttcaaagctcttctgtcagcccacatgcccatgtgggaacatttgaaggatgtcttgaatctggctcctctgggcgaagaggtttgggaggaaatgacggaataattcatttgtttctacacaatacatcatgattgcttgagtaagaatcaccttcgagtgtttccattctcagcccgggacgaaatgcttagggcggggaaggaggtaaaggaatgaagtctattccgaaatctgccgtgaggtatgcttctttttatctgaaatcatttactgaattccgattccacaaagttccgaatacgctgtacgatggcggtaaactcttcaatttcgccaaacaacatcggtttcatttggatgtagtcacgagcccaggactgataactgtgatcatcaggaggcaggatattcatatcggaaggacccagatgttcgtaatcgatccatgaatatccataattgactgcacgttgttgtttgatttgttcaaacaaagagttgtcgtacatgccatttctgatcagggcgtccagatcataatagtgtctggccaaccgtggtttgcttgggcctccccgcacgttttcctcatgcagaatgaacgccttttcccaaaaggttcgtttgggagaaacgacttgcagagaaacaggttctgccagttcgggaaaaacttgggctatataggagtcgatttcagcaggagaggaaggtgttgtctctgctctgccgcttagttccagtttgaccgccggagccacataggaaccggcatcatgttccagcacggaaggataatgaatgaaaagaacgaacgggtcgcgagccttactgagatcttccagttcaaaacgaacccctgaaataccacgacagtcaaaggattgctgtaaggctggcaggatgaagtcacacatcagattcctgtaatactctctcatcttgcgctgcttgcgatcacgctgcgacgaagattcaccaggaacggggagcaactctctgggcatgtctgaaaagaacgcaggagacaaagcaatgtctatgtcttcagaaaagcgctggatgcaatgaaaggcttttgacaaggatgtgccaccccggaaacacaaatgaggctctaacgcttggttttcaaacaacatatccagaacccggcatacccagtagtctttttccagaaagagagctggcaaacctaattggttctgagtttcagcaagcacatcacgctgctgttcggggacaagctgaaaataacgaatcatgacggcaaattgcagataatgggacgcatccattcaggagcttggggtgcccaccggttgagttgcttcttatcgttcgatgaaaggttttgagacaagcgggaacgcacttcttccacactagtctgattcttaccgaggaaacgcaatgccatatatacttctcccatgatggtgcctgacaaatccatcaggtttttggccgtgcggcgtaacctgatttgcaaagccccgatacggaactcttttgaccgtccatctgtcaaatactcataagaggcgggaacctgatcgctcaacccgagtttgttggcaaggcttgcccctgtcggcatgatgcgggaacctgttttacgagccagagcctgaatgatctgatccggagacggaggcaatggccgttgagaataactgctgattcggggcatgtaatacaacccggttgcaatcctgacaatacatcctctctctgccagccgggaaagagactgatccaaagcagccctggtaccaagttccttcaagtctacagctgagaacacatctcccaaggcaaatcgctttttgatttgcttcagcatgtcgattctggttgcggacaagttcatatctttctgaggagctgtaaataatttgcacgatctctgacataaggtcaagatatatacttgcacgatttctgacatcatgtatttcgggcaatccatcatacgattcaggcgtgatgactcgttggttgatcagaaagaccatgaagagcatcatggaaagacagcagatcattcgaagtattaccgccttcttcgaagatagaggtattacctggaacaaggtttatatcggagtaactaacaatgcagaaaaacgcctgtttcaggaccataatgtggacaggagggaggacgactacatcgtctgccaatcccggtctgctgatgaagcacgcagtatcgaaggatatttccaggagcttggggcctccggcttcaatggaggaggcaatgacaccagcagcattgtctacgcctatcgcaaaaggggctatacgattgaataagcctgtctttcggatggagacatccatctgaaaatccccctctcttcacgtcatatatcattgaggaagtagatgctctgcttcctgcctgtgcccgcctcccggctttgttccgggaggcgggctttttgttgcaacaaaccaatcatcaatgaacatgaatactcgtacatccacacgtgaactctatcgtaaccgagataacagccctctggacagattccagatccggcgtgtcgctccctccgtctttgccgaccgtgaggacgacagccgttcggagaagtaccgtttcgtctcgtccgactccctgctcgaccagatggaagaggctggattcctcgtcgtcggagctcaggaacaacgtacccggaaatcggacggcacgcccacccgcaagcacctgattcgcttcgcccaccgggacgtgctggaacacaaccgtgagcagcgcatcgaagtggtcatgatcaacagtcacaacggcagctgctcctaccagctcatggccggtatcttccggctggtgtgtaccaacggtctgattgtcggggcgcgtattgccgcgatcaacattcgtcacatgggtcataccggagaagaggtgatcgccgccagtctccggctggcctctgaaacgccccggatcatggacgacattcaccgcatgcagggagtcgaactaccctacaagcgtcaggtggacttcgttcatgaagcggcacagctgcgaatgggagacgactacgaagacaaaatacgtcccgaagcccttctgtcgccccggcgctggaacgacatcggctttacggcgggaggaccagctaccgtctggcagtgcttcaaccgggttcaggaaaacctgatccggggaggcgttcctttaaaaccgcagacggacggcgtatatcgtcgccgctccctgcgtgcgctcaatggcattgacggaaacacacgcctgaaccgggagctctgggatctggccgacagctataccctgaacaactgatctgaaacgaccatgagaagaaaacaacatctacggttgaaacgtctggggcgggctccgtccctgaccggactggagctgtccattctcctgtaccttcacggcgactttgaacgcagtgacaaggagatcatggcggaatgccatggcatcaagcaggaaagcgtcaggcattccgtccgaggtctggccgggcgggagttcatcatccgcacaaaggaagaggaatttctgcttcggtccgattgctggctgattacctatgccggacggcaggcgctcaggcaatgggtgtccgctgccgctccggttcgtcgatcatcccggacaagaattcccgcatgaggcacgtcatgaacatgaaaggcatcatgatcgccctggtggcgctcgtactgctgtgtctgctgggaccgattgtcgtcggcgtcctgtcggctctggtggccgtagcaccgtacctgctagccgtgctgttgctcatgggcgtcatcgccttcttctgcaagtaactccgacaggaaaggaagagaacgagacatgaagacgatgcccatcatcgcgcaactgcgttccacgagcggatccgatacggacgtatctggaagtggatacggagctattggcccggatcgggaaggcagtgtcgctttgcagcagtcatcagaacgatccatcgctggggctgagcacgctgacgattcacgggccgtccatgacggctctggtgaatctcccggaactgacggaagaacagcagaagtctctggacgacgacgaaagcatcctgctggattcgccgattccggaggcggagctggctacccttgaaagctgcatccggctctgcggtgaagccatcgacattcttgatgtccggtatctgtatgccgtcgcctgcaacaagcacacacgggacatgtatgaggccaatatcggggccgtactgagacatctgctcaagtcccgccatcatcccggaaaggaggtgttgcctgatgctgacgattgaaaagtacaagggcacccgcttctgggccgtctttcaagacggagagctgttggccgtgaccgtgtacaaacgaggggctcaggccattgtcaggacgctggaagccaaggacggataaggcctccattcagcagctcttcttcatcatgaaggagagctgttttttagctgtcgcagggaggttccgattctggcctcagattatgaatacgtattgagggtaatgtagagcccggatatgtctgggcctacgtctgcaagtacttgttctctcccagtctggataaacacaggtacgagtacaaactgtataccccagagtcggttaaagctgctattccgaaatggatcaacgagtatcaggataaggagatgatcaagcagttccgggaagccgggctgtatgagcctccgagaatatcgtagttgaacccagtgtgacactgcgtgtctcattttcttgcaaaatcctgcactgaaacaggggtaaatgtgacactgagggcacagaatggcaacagtctaatgagggatattcggtgctaatgattgattaggagcagattgcagaggtttgagttatggtgtgtaaggccgctgcgccaccacttttgagataacacgcatgcgaatcattcctcccggaataaaaccgcacaggcaaactttctgcacgcccttcttctaaagaagaagggcgttgctgataacgaaaagaaataaatccccttctgcagaataattgcgaccatcttgcagcattctctcacagcacccggagacggctctccgggtgctgtgattgtttttagccccaggatgccccaggcaggccgtttattctccggagcgagatatgaggccagctcccttacggggcgttctgaagccatttataccccaatatcgaggacattctgccacgcagcggacttcctgtatgaattccttgttgcaaacagtttattgttttgaatcaccctgatatttcatgaggtcaagtccataggttcgcaactgcatgagttcgtccacaaggttcctgacaaactcggtttttaacgcattgagctgccgttttttcattccgaacaaaatttgataatcggtgtctgtcgctttctcctccagatatctgaaaagatcaggatgttcgaaaagttctttccagttttgtgactgatgaaattcctgcacctgtttatttggaattttgattctgcccaagtagcaccccagtacatatgcttcgataccacccgaagcaaagccgtaatagcgcggaattcctttctcgtcaaaggggccgttgttccacgcttgaatactggaatcgagccagatttcacgttgatatttcaaatacgaccgcagcccgttttctgtccaggaggggatatggtacccgtcaatcggctttggccattccttgaattccgacagcatttccgggcacagagatacgatacagcatatacgttctgttatttttgactgccaactgattatcgcttgagggtggtaaaattcgggagaatcatgaattccatgaatcacactgaacggttgtttgcgtgtgctgaatctctggacaatccagtcaacgaatgggatcgaacgcttgagggcaaacgctccgagatcatccagatagtcttcgtaatccgtcatggtggaatcaaaaagaagccgggcccaatgggtatgtttaagcagccataaaatgatagcaccgggaggcaagttctcttcatttttgtacagtgcaatagcctttcttacatcggccatggcatgtctctgccactgttgaaccagcctgttcagctcccgcaaggaaacctcctctccttcctttcgataaggaacccattccgggattagcggctcatcaccctgtatcccgggggaagagtcgagactggggcggtcagggcgcagccccgccgccgcaggcgagctattcattcctgtcgaagtcgtcggtaacgacaggtcagaggcggtgccgagacctgtcgttatcagacttttgttattcacgacgcaattcttcatctcggtcatccgcaaattttcatcttggttttgcatggcttcaattcgtacccgacgtccatcaggtatcttcagaggagggttcgaaacagctttgtatagacaaagggtacctcgaacatccctcttgctccggagaggtgattcttccagatacccggctttgcgtaacttgttaaggcgtgacttcagcgcagacacagagatcttcttgttcaaaaaatgaggcaatttctgatgaatggccttgagtgtatgatttttcggaggtgtcgtctggcaatggatgtataaccagagccagaatgcccggtccttggcagtaagtcgagtgtccagcattggcccgttgggaacggggatttctatgcgtttgatgccttttttgtcaacttctctgatatttagacagatgtcttgatgcctttgacgatcacaaaggttcagacctctaggaacacctcctttcgctacttcgatccaattatcagggaaggcggtccttgccctccagttttgcaggtcatgataatacagaggagttccttcctttttgggtatacgctgtttacagcaccaatgatttttcgcaagggcatttagcacagaaggcagggttcttacggaaatgcctgtcccattactgattgagctgatggtatgcacggtaaaacaatcacgtgcgtaaagatagaaccagacaactgcctggttgtgatcttcgaagagtgaaagcataatccgagagaaaggcgtgtagtttcctcttctttcggtatattgtgcttcgattgatgcgtcggaacgcttcctttgttttttgcaggtactcatgattagtatgaagcaagagcatactttgctaatgaaaatagttccttcaggcgctcttgatactgaagggggaaaataatgtgggatctcgtttggatctcccgttcaagttttatgagactcagcgagtctccttcccggctatgccggagtgcctgccttcatcaagaatgcaggacaattaaccttattaagtaatatgagaaatgcccctgtcgtgaaactccggcgaactcgctgggggtggaactcaaggaacaggtatgaggagctagaccaccattccttgtacgttccgggtttatagaaaacccaatgaaacgcttgagagcgtcaagatgtcctgcgctcaatggtgacgacggacaacgaaaaccagttactacatctgaagatggaggtcaacaaaaacagcaggttaatgaccagtttcctccggaaatacatggaaccatgcttcgccttcggcagcacgaacgccttcccggtaatgcttttccgtcatgttggttcccgagtgtccaagccacatggatacccggggtatatcgtgtgttttggctgcggcatatgaggcaaacgaatggcgtagggcattatgcggtagcgtgatgcctgcaatttctgccatttttttgaggcagcgtccatggcgattctcgtataatctgtcaatttcgtcaggagccggttcatattccgccaaggcgagccaggccttggcagcggcagggagtggaacaaaacgttgtttcccggttttggctattgaggccgagacaaatacttcatccttttcatcaaggatggcatcccgtgttattctaacgcattcggaacggcgcagcccgcaaaaggcgaccaggaccaatcggaacaacattcctctgtcgtgctcaagggcagcttgcaggagtttcttcagttcagacggagagatgataccaatctggacagattccgctctcggagcaagcgttctttcaaccgggttatacgcaatgaggtccctgctctgcgcccagacaaagaatccatgcagggttgtacggtaacgccgtttggtagcattactgagtggttgtttccgatatcggaatgaggccagcttttcttcaatcatgtccggcattatctgattgagcggaaggtcttcccatcccagtagccatttttgcagttccatgatcatgctgtcatgatgggcttttttgatgaggttagattcgagcttcttatcgatcacttcctgatattgctctgcgagggtgccgaactttcttttgaagtcaactttgacctgttctttcttgttcgcaaggaatctggtcagagaaaacaaattggtcagttcttccagcctgttcaaattttcctcgtccgtacgcgttaccatccagttgccattagcgtctttccgaccataaatcgcgccactggctatttctctcttcaggttcttcaaggcttcacgtactaccagatacaaagggagagaagattgttgggttacttcatcatagatgctcctgaattctctccataaaagaatagcattgtagtcctgttcatctacatgttccctccattcctgctttcgcaagtgttccggcaacatatcgttcaatgattgatgctgaagtcgttgataggctttcagcgcctcttcataggaatcaaagagtcggtgagtttcccggtcaccggacatatcgcgcaccagccattttctctttccccggtgctttctcggggaaagagaggcatgtgaaccatattgattttttcgggatcttctcacggttgaaagtatcccatgatcatttatattgacaaaccaaaagtgtgtacaaagtgtgtacagtcatataacttattgataattatcatacagaatcagacttaggatctggtgccgaaaggcgtacaggttcgagtcctgccaggcgcaccatttataccccccttaagtaaacaacttgaagaggggtttttgtttatggtgaaaaattggaccctttcacgccgctttcgcccctatttgacaaggtatttgcgccatgcaaactacatcatgcacggatatttggccgccatgtaaaacaacaatccagtgccttattcatcattatttacgcttgttaccatcagataaggcgattggatgaattactccgcagtaatgacaagaagtacccggctgacgactcccaacagaaaagccggcggccgcccttcgcactcgcctgccctgtccgtacatttggaagtcaattcgtactcccggcaaagagaatattttaaaatcctccttaaaaattaatttaaaatccttattatcaacataaaaaataatcatgcataccatttatacatgtacccaagggaaaatcgaacccgttaatatcggaaatttcataccacgcatccaacaatacggtcagcatctgtccccccgccactatcagggcccaactccatatattccgaaaagacagggaataaaacgcaatattttgactacatatcaaaaaggcctgttaacatttgacgccaatccagcaatgctgtattccaccaacctgttgtcgtgcgtttcagtcatttacacatcgacagacatacgcgctcaagcatgcgcccatgttcatcacgtcaattgcggcaacctggcactaactgatattgatcaagcaatccagtccctttacccggacaattcagcctatccatccgacccccgtaaaatctatgtagtctatgcccaccccaccagcaatgtttcgtacggagatgaaatcaaaaaattgatggaatgcggcattctcttgaacaacatcgtggaaatcgaagaattgcctacaggaagcttcggaatagataataatggctatatcggctgcgttgattgacgcacccgcatgttcatttccttctccctggcaaacagacaaccctgaatttttcattcccttttccgggaggctacctgaactttttcaggaagggtgcaatgaacgccgtgcccagccccaccagggcaatgagggagaaggaccaccggagggaggaagcatgggcaatgtggccgatgaccggaggccccagcaggaagcccagaaagccgatggtggagacggaggccagggctacgcttggtatcatttttttggattttccggccatgctgtagcaaaggggaacgatggaggaggtaccgaagcccaccagcaggaagcccagcgtggcggaccacagcatggggaacaggacggagaccagcagcccggaggcaatgagaatgccgctggcgcgcagcacgcgcacggggccgaagcgcatcaccatgcggtccgccgtaaagcgtcccagggccatggtgctcatgaacgccacgtagcccatctgcaccagtccgggaccgggctgcaccacgctttcaaagtacacgccgctccagtcaaacatggttccctcgctcaccatgcttccgaaggcgatcagtccgatcaccaagacataggcatccatgctccggaacatgcctccgccctgggtggaggagcggcgtgcatcccgcggcaggagggagggggaaaagacggccagaatgaccatgcacatcaggaaaatggcgatgaagtgcatttccgtggataccttccagtccaccatcaccgcccccagcagggcgccgaagaatcccgccaggctccacaagccatggaaccgggccatgatgctgcactggtacagccgctccactcccacgccctgcgtgttgacggagatattcgtcaaattagcggccaccccgaagaaaaacagccccgccgccagttcccagaaggaggacgccatgcccagatacacaagcacggcgggataaaagatggaagccgctatcagtatcctccggctgccgcaacggcccaccagatagccggacagcgccatggcggacatttgccccaccggaacggcaaagagcacggagccaaggtcggcgtcattcagtcccagcgcattcttgatgtccggaatacggcacgcccaactggcgaataccaggccctggagaaaatagaaggtgctgaccgacaggcggtagacgccctgcgtcgttttgggaagaggcagattcatgctggatttcctggtcacgcagacgctatccccattccctttccctggcaagagaaatcatctttcatacaataagaatttatccgcaaaagagacatagaggcaaggaataagccttaaggggatttttccccgccataggatttcccagggttgtcccctttcttccacatgaaaaacgccgcgttcccgacggagcacggcgtttgatgaaatggaataaggaagggtcagcggggatcgtggtgccagttcagggcccccttgcccagcgcgtacaggtaggccaccagcagaatgccgatgaagatgcacatggccgtgaaggattccggattcatcatcacatagtcccggaagttgacggcccagggatagaggaataccacttccaggtcaaagatgacgaagagcatggccaccatgtagaatttcacggagaacatgggagcgccttcccccatgggaatcatcccgcattcgtagggaatgtccgcaggcttgcgcacggaggagcgcttgcccatcaagatactgagcaacaagataatgccggccagccccagggctgccaccacttgcacaagcactgaaaagaattcctgattcatgacgtctggcacggatgtaccatatacgccccggaaaagcaaaactaaaaagggcagcggctttcatgctgacgggggcgcccgtttcctcccggaaccggaaccgttatgatgaaccgcgttccccatgtccctgcattccttcctccagtcacggctctgccgcacattttccttagaaaaacgggcggcgcaacggttccaccctccggaaccgataccgcaccgcagccactggagcatcgtcaaatggatgctcacgcgccgtccgcgcccctatccgtccgtggcggaaaacgcccgtattccctcctttcatgttcccgtggaacggaggcaatgggaggccgtcatggtcaatcatgccaccatcctgattcggctgcacggcctgaacgtgctgacggaccccgtctggtccggccgcgtgagccccgtggcatggatgggccccaaacggaagcggcccgcgggtatcgcatgggaggatctgccgcaggtggacgccgtactggtttcacacgaccattacgaccattttgacgcgcccaccctgaaaaggctggaggaacgcttccaccccatctttcttgttcctctggggctgcgccgcctgcttctccgccattgcggcgcacaggcgcagatccgcgagctggactggtggcagtccgccgccctgccgtccggggatggggaaaccaccgtgacttttacccccgcacggcattacagcggccgcagtccattccacggagacgccaaccggtccctgtggggaggctttttcctgcgcgcggcggacggcccgggaatttattttgccggagatacggcccggacacgctttttcgcggaaatacgggaccgcctcggctctccggacctggcccttctttccatcgggtcctatcttccggaagaactcatggcaggcgtccatctgtcgccgcgcgacgcagtccgggcctttaaaacgctgcgcgccaggcagggcatggccttccacttcggcacctggcaactagcggacgacggctaccaggaaacgctggacgatttccgggaagcccttcgccgggaaggcgtggaggaagcatccttcattgccgcggacaacggctttacgctcccatcaaatggagaacccagtccccagccgcttccatcagaaccagatatcccgccagaatcccaagaaggggatcctccagcttgaacagcagaaagccagttcccggcaaaacgccgcccacgcaggcgaacacggccatcaccggcatggaacataagcctgccagccacgccaggatgccccatgcccttgttttaccagtttccctgctcccggcaatatggaccggacggctcagcagtccccggccccaccctgcggagcatggacctccagcaactttccgagcacctgcatgactccgttttcctgattggacggggcctcaaacgcggccatggcacggatttccggcacggcgttcgccacggcatagctgaaccgggcctgccgcatcatttccgcatcattcatctggtccccaaagaccatcgtttcctccggagaaatgcccagtttccgctgaatcagctccagggcggcgcccttatcggctcccttccggctgatgtccatccatttttctccggagacggccacctggaagccatgctccaaatgcttcaggcggggataactgttttccttcgctcccttgaagtcatatacggctattttcagcagcttgtccccctgcacgtccagcaggtcatccacctccttgcagcgggtgtaataccggcgggcctcccggacgaattccggctgtttatcttcaatatatgcggagtccaggcctgcaaggacaatgcacgtcccttcaatgcgcctgatcatggcaatcagcccggccaccgtttcacggtccatgtccagcaccagccattctctggaaccagacgccacataggcgccgttttcggcaatgaacagcatccggtccgccacgggggcaaaggtccggcgcagtccgtcatactggcgcccgctggccgccgcaaagcggatgccccggtgttcaagttttttaaagagggagaaaaacgcagggtccagttctccctttccattgagcagcgttccatccatatcggacgcaataagtttgacggagtccataacgttgcctgaatcatcatgcgccgtttcttccaaggcaagagcggcttcagacagcatgggccaggcgacggaagagacgtttcagcacacagtaacggaaataccgccttttttccggctgtttttacggaaaactggtgctccctgcattttttaacttcaatggcaacaacagcaaatgaaagaaattttaagacagccgtcacaaccgcaacgcctaacgcatcataccggattgtgaatccggacataattcaaataattggaattaaatgaaccacatcataagacccatgtccaatatgacgtccggggcatgacaccatattttccgccaccctcgcaaatgactttatccacgggcttcttttccatatcaggcgggaaaaaatctccctccggattcacaatccgccgtttaaatttccatataattcgctccgggcattccttgcgcgtaccattttttcattgcccgaagttacggattcctgcatcatggctttttgcagttcccctgcttatgatacacacgaccttaagaaagaaaaccctctggtttcttggagctttgagcgtttttgcggctcttgtcgcaggctccaccattttctggttcctcaggaatgacccttcccccgcggaatggaaattcaaccctatctggacaaaagcggaaagggagcaaattcttaccgcagcggatttcacggcgcaccgcagcccggagcgtttcattttccgcgggctttcccccaattcccgccatattgactggcacatgttttccgaggtttccatgcgccagtacatgcaggacgaaatcagggaaaggctccagatgatccggaatacggcggagagcgcggacggccgctgcagcacctcgtcccacgaaaccctgctgcacctggctgcggggctcggagaggtgcaattgctgggccgccttctgcagcgcaacgcggacccgaacctccagatcatcctgccgcaccaggcccttccctccatcccggggtccgaacagggggatacacccctgacttatgcctgccagcccggaatggacgataccaggcccctgccggtgcacaacaggctttcctgccttaacctgctgatccaaaacggcgcggatgtggataaaccgggcccgatgggctggcctcccctcgtcatgacctgcgtagccggcatcggaggggcgccctatgaggaaacggctctgtttcttctgaaatgcggggcggatatttccctccagccggaattgaggggtaaaaaaaccagtctgctgacctgggccgccgctgccggataccctcttctggtccgcaagctttgcgaagccgggtatgatcccaatttccgcggagagatgacccctccccttctttccctgaacctgaacaccccgaaaaccgcgctgcaaatcgcgcataccctgctggagtacggggcggacgtcaacgcggccatgcccatgaacacggctccgccggattccggaggagacacggccctgctgaacctgtgccgccaattggctttcattgatatatcccatctcccccaaatcagggaactggtcaatcttttcatcagcgagggggcggacgtcaaccatcaaaacgcagccggggaaacggccctcatgctgtgctgccgtgacatgctgctgggggacgattcccttgaccgcctgaaactgggcattgcacgcctgctgctggaccaccaggcagacccttccctgcgtgacaagtacgggcgcacggtcctccagcagataggcaaccggtcaaacgaccatctgcacatggtcctgaagaacctgccggagttaaacgcttcaccgcttccgaaaaagagaggccgctgagttcctgccgcccccctgcggcaggacgccttttatttcacccgggcgttcaccgtatccagcaggacgccggcatccggtttggaaccggtgctgatgaaatggatgtaactggctccgttgggagattgattggccattttcagcgttccggccttcttcccgtccagggagaccacagcctgcggcccctgccacagaatggaaatttcatgccacgcgccgggcgcaaaaggaacttttttcatgcccagcagcagatggggcgcgggcttcagcttgatggggaaggtgaacagggcgtaatccttcgtggtggtatcacaggcattgaacaggcggtccgtcagggaaacctgaaggccggaatcgtccgcctggtccccgtccgccacgcggaagcggaacttgaccagccccgtggtcccgttcgggaagttccaggtggcgcccccgttctggtaatccacattggatttctcattaaccagttctggatcattcaggcgtttgatttgcagcactttttttccacctccggaggggtcgggcaccagttcagcggagggtttgcggttatagctgcaatggccttttttctgggggatataggtatggatggtccactggccgtccaggtccctgcccgtctgcgtggaacgcgttttggcagccacccagcggcggtccacgatgaccaggcggcggtggtttttgtgctgccccagggaaatcaggatgcggttcttgtcaagctgcaccatttcactctggtgcttgccgcggtcctccggaccgtccagggtggcatagccgggatggttgcggtgttcgtccagaatgatttcccggaagccgtaccacgtctttccttcgtcatcagacatggcgatgtggtgggaatcacggttggtgaacacgtcctcccacgtgccgttgcctgccgtggcgttttcaggcagggccatcgtgttcgtccacagggagacgatggttccgtcatccaggcggcccagcgtattcatggtcagggttccgaagaaacgggacggctccggcttgctccatgtttcaccgaaatccttggagaaagcctgccacgcctggtcctgggaggtgcgggccagcgcccacagggtgccgtccttcatttccagcactgtggcttccacggcattgttgaaccacctgacgccctggtggggcggcctggcttcatgcttgggagaggtaacgccatttttggacacgcgccaggtcaggcctccgtcgtcggaaatatggaacttggtgccgccgcccatgttatggaacggcacgatcaccctcctgcccttgttgacaaaggtgggcgtgcgcatgatgccgcccagttttttcagatttttctgcttctccggatttttccagtcttcctccagcttgccgtcgttcgtgaccgcaaaccacttgccgtccaggcctcccttggagaggaagatgaaccctccgatgggctgcacgcggatgaattccctggtcacggggttgcgcgcaatcgccggggattccttgggaatgcctccatagttgggcgggtagccgctcggagccgccttcatttcccaggtctttccgttgtccttgctgaccaggtagtccggttccttgcgggtgccggagtaatagcggatttcacgggagttcacgcggatgaggccgcgtccggcatcggacggcggcgtagcgacaatttcaggctccggagcgggagcggcgttctgctgggcataacagcagcagacggaaccggcaaacaacgcaaacaacaggtttttcataaatcaaatactaaaggcggtacattttcctcaaacaggacttccccttcaagcacaattccctccttcctcaaaaagaccaccgtcaggaatgcttgcccgcggatttcccgccgcggtatttcgcatccagctttttcagaagtacggccagttccttctccagcacctcgtaccctttggcattgggatgcactacatccttcatcaattcattgcgcggagaaacgccgtccgcggaaaggagagccttccccggatcggcaaaaaagacgttttttccattctgcagctttgcgagcagcttgttcgtctgcttcaccggctccgtcaggtttttctccctcctgggcagaatgcccagcagcaggattttggaagaggggcatttctgatgcaccaggcgaacaaatgccttgatattgtccgcacaggcctgcggagcatccttccggtggcccagattgttggttcccagcagaataatgatgacccgcggggagatgccggccagctccccgttctgcacgcggtaataggcattgtccacataatcaaagccaaagcccatgttggtcaccgcatggggaccgaacaatttctcccaggaggcctcccccgccttcctgctgtctccggagggttcccctccccaatgatgggtgatgctgtcccctatcatcacgtattccggcttcacggcccggttccgcttcttgacggcttcatgccgcgcattccagtcatacggatcccgctggtggggttccggcttcagggtggcgggcagcgcggccgcaggagcggaaaatgcggggagcgccaggcaggcggcacccagcagcgcagtgaacgtatacagcagggaattcatgacggaaaaacggaattgaaaagcagtttaaagaaatacttccgcgcatcaagaccacatgctgaagcggcctttcccggaagaaaaagaccactgccccgacagccggccatgccgcgccggaacatcaggacgcgcatcctcccattcctgtcttaccgaactacggaacctcccttgtatctgccgtctattttctccagaagcgaactcaattccttccccagcacgtcatatcccgcagcactgggatgcaagccatccaccagcaggccgctctttggcgacacgccatcttctgccagaaacgccgtgcccggattggcaaaaaacaccctctttccatcagcaagaacggatatcattttattagtttccacaatcaggggcgccaccgccttttccttcctgggcagaatgcccaggagcaggattttagaggccgggcacttccgccccaccaggctcacaaaagccttgaggttgtccgcgcatgactggggggtatccttcctgccgccaagattattggttcccaaaagcacgatgatcacgcgcggagagattccgtccagttccccaagctgcacacggtagtaggcattgtccacgtaatctgagccaaaccccatattggtcaccgtatgaggggagaaaagatttttccatgcctcctttcccgtccccagggccctgttgtctccggaaggctcccctccccagcggtgggtaatgctgtcgccaaagacggcatattccggattaacgctccggttcctctccatcacggccttatgacggccattccagtcataaacggcgcgctcgttcacctgaggctttagcgtagacggcagctcattggcgcacgcgccggagaaaaaggccgcgcaagaaactcccgccagcaacaaacagaggaatgaatgggatttcatcaaaatgatagttaaaatattgttggcggcaatttggagagtaaagaaaaaactatcccccataaccgtaaatttccctcattttttattccggaacagccagatgcctgaaacagaccagcgcaaccgctcccgttccccctcctggaagaattggccttgttgaccgctaacattcccggtataatcaggcggtgcggagtttcgccgcttccgggctttcagcgggcgcggagcgtctttctccggtcttcttcactacatcctatttatgatcagcatagtaaaagacttgaaggaatcccccgcccttccgcaggaatggcagggattcaagccgggagcatggacggagtccattgacgtacgggatttcatccagaacaactacacgccctattccggcaatgaagagtttctttccggcccctcccaacgcacgctccggctctgggaggaactgaaagtcctgctgaaacgggaaatagacaacggcggcgtgctggatgcggaccaggaagtggtctcctccatcgtctcccacaagcccggctacattgacaaggagctggaagtggtggtgggcctccagacggacgctcccctgaaacgcgccctgatgcccttcggcggcctgcgcatggcccagcaggccctggaatcctacgggttcaagatgtgcgaaaaaacggcggatattttcaacaagatacgcaagacgcataacgagggcgttttcgacgcctacacctccgacatccgcgccgcccgctccgccggcatcatcaccggacttccggacgcctacggccgcggccgcatcatcggggactaccgccgcgtggccctgtacggcacggacaagctgattgccgaacgccgcaaggatctcaaaaaccgtgaaaattccccccttacggatgagctgatccgcctgcgcgaggaaatgagcgaacaaatccgcgccctggaggaactcgcccggatgggcgcctcctacggctgcgacctcagccgccccgccgggaacgcccgcgaagccgtgcaatggacctacctgggctacctggccgccgtgaaggaacagaacggcgcggccatgtccctgggccgcgtctccaccttctttgacatttactttacccgcgacctggaacagggcctcatcacggaagagggagtgcaggaaatcattgaccagttcgtgatgaagctgcgcatcgtccgcttcatccgcacgccggactacaacaacctgttctccggggaccccacctgggtgacggaatccatcggcggcatgggggaagacgggcgcaccctcgtcacccgcagctccttccgcatgctccagacgctgtacaacctgggtccggctccggagccgaacctgacggtgctgtggtccgggaacctgccggaagccttcaagaatttctgcgccagggtttccattgaaacgtcctccgtccagtacgagaacgacgacctgatgcgcccgcactggggcgacgactacggcatcgcctgctgcgtgtccgccatgcgcatcggcaagcagatgcaattcttcggtgcgcgcgccaacctcgccaagtgcctgctgtacgccctgaacggcggcgtggacgaactcaaggggaaacaggtggccccgccctccccgcgctatacggaggaagtgctcaagtacgacgaagtgatggccctgtacgacaagatgcaggactggcttgccaaaacctacgttgacgcgctgaacatcatccactacatgcacgacaagtactgctatgaacgcattgaaatggcgctgcatgatccggaaatcctgcgcaccatggccacgggcatcgccgggctctccgtggccgcggactccctgtccgccatcaagtacgccaccgtgaaggccgtccgcaatgaagagggcctgattgtggatttcaagacggaaggggaattcccgtgctacgggaacaacgacccgcgcgtggacgaaatcgcatgcagcctggtcagcaacttcatggaaaagctgcgcaagctccacacctaccgcaactccctgcccacccagtccatcctgaccatcacctccaacgtggtgtacggcaagaagacgggcaacacgccggacggccgccgcgccggggaaccgttcgcgcccggcgccaaccccatgcacggaagggacaggaacggagccgtggcctccatgctctccgtagccaaactgtcctatggcgactccctggacggcatctcctacaccttctccatcgtgccgcaggccctgggcaaggaagaaggggaacgccgcacgaagctcgtctccctgctggacgcctactttgccgccaccgggcaccacatcaacgtgaacgtgctggagcgggaaaccctccttgacgcgatggaccacccggaaaaataccctcagctcaccatccgcgtttccggctatgccgtgaacttcatcaagctgacccgggaacagcagcaggaggtcatcaaccgcaccttccatacccgttaacccagccaggaagcggatgccgcaggctttctcccagaatccggccccggacggtgaaactgccgtcaccggactggtccattccgtggaatcctgcggcaccgtggacggtccaggcatccgctttgtcctcttcctgtccgggtgcagcctgcgctgccgctactgccacaatccggacacctcctacgtgcggaggggacgccgcagaagcgtggccgacgtccttgaagaaatagcccgctaccgggatttcctgctggcggcgggcggaggcgtcaccctttccgggggagatccccttttccagccggattttgcgagaaccgtactgaaaggatgcaagaaactggggctgcacacctgcctggacacctccggccatctgggcgcgaacgcggatgaagaactgctggcgaatacggacctcgtcctgctggacatcaaggcgtggaacccggaacggtaccgggccctggcaggcggggaattgcgccccaccctggaattcgcggaacgcctggccgccctccgcaaacccgtctggctgcgctacgtcctggttccgggcctcacggacaacatggaagacatcacagagctctcccgccatgcggcgcgcctgggcaacgtggagcgcgtggacgtgctccccttccaccagatggggcgcttcaagtgggatgaactgaagctggactacaccttgaaggacgttccggaaccttccgaggaactgacggaacaggtccgcgacatcttccgccaggaagaaaatttaaaaagttccgtgcattgaaggcaggaaaaattcttttcaaccatgaggcgtttataaaacatccattcctccttttaccattccaagtaaaatctctaccttatattcagcttttaaagcacgttcacgccatattctgacatccaaagccagaccctcctcccgtgcttgtaacagcaacgcaagaatacattcccgtatgcagggaggaattttttctccctgttccaaacgaactatatcggtcacgtcatatccagacaattcagcaagatgagccagcgttaaaccggcatcatttctcaactttttaaaattaatgcctttagacatgacttcctgtttaacacaggcgtttcttcatcataagaaaaaggactaagctcttttcttggtagagaaacccgttaaatttcagaggttgttatttccctcagagcatccaatacctcctgcacggcaatatggcggttgcagggaacatcacggtcgcactccttcaggaagcagggggaacagcactggtggctgtacagggagcggttgaaggggcccatgggccggcaaacgtccgggaggcgggtggaaaacagggtcaccaccggaagaccgcggaaggagcagagggacggaatgtcaccatccacagccacggccgccacggcggcatccatcacggggaacaaggcttccggagttcccaccgccagctccacattcaggcgttccgccagagcggacgcgcgttcccggtcttcttccagagcggccagtacgggcctgcccggcagaagggaaaccagctccgcccattgttcctcactccattcactggcgctgcccaagctggagaacggagccagcaggatgggggcgttttccgccgcagccgcctttttcaccgggaacagggacggattccaggcatccagcccgtgcagcccccccagttgcagataaagctgaacccggtgcatggggggagcggcgcgcaggacgggagccttcacccggaatttgtatttccgtgcgccgggatgcgtgtccagcccggagaacatcatgggcccgtacggttccagcgccttgagcgtttccatgtcctggtccagcatgacgcccaggtccagcggaccgtcattgtaaaattcatccgcggccagcgcctcccggagctgattcagggaatcgtgcggcagaacatgggtgacttccggcaccgccttccatacccccgcctgcgcggacgggcagatgacgttcacctgcatgtcgcgccggacggctttcagcgcacggaccaggggaacggtcaccagggcttcatccagcgccttgggaacagccaccagaatgcggtacggctgcagctccatgttttccagaaggccgtccgtttttttatcctgcggagcaaagcggtcgatggacttccagcggtggtgcatccagaacacgtccagaacggacttgcggatcaacgtttccaggctccggttcacttcaatggtgtcccccgccagggaaccgtccgagttggaaaaatccaccacgttccccatgtccgctatccagtgtccgggagaatccgtgcgtactgcgatggctaccatatccgctcccgtcctcttccgcagcaaagcgggcaacggcgtcgtgccggtcaccttgccgaagaaggggacatacaccccctcccagacgaactggtcgctcagcacacccagggcgccgccctccttgaccatcttcatgggagccttgatgccgccttccttggaaaacatccgcgtgccccgctccgtgcgccgcttgtatacgtattcctccatcagcgggttgtcaaactggcggtatatggacccgtaacgttccacttctggaaagaacacgcgtatcctcgccagcgcctcccagttgccggaatgggctatggcgcatacctgcccgcgcctttccgccgcaggagcggcaaattcttcatgccccgcgatggtgacgcattttttcaactgctcatccgtcagggtggccgtcttcgcggagcacaggaaattggctatcgtccttttgaaattttccctgctcaatttttgcagttccctgccgcgcagggccggatccagcacaatgcgcaggtttctttccacaattttccggcgttgcggcagcaagtaccacgccacgccgcccgccacgcgccccaggcggtaaagcgttttcatgcccacgagcttcagcagcccttccatgatcaggaatcctttcattcccagctgatgggcaaatgcagggcgagaaggagaggatgaaggggagctcgtcataagaaaaccggagaacattttatacgaatcccttccggtccacaaaccctttattctcccgcatgcggcttccctcccgcgttccggcggcctgccgtcccgggaagccccgttccatgcttccttcccacggcggaaaagaaccgctgccggaacggaaactgcaccgccctcccgccccgttccggatttcaccatgaactgtttctcctccaaatgcaggaaaaagcttccggaaggctgcaactgccgcaagctgcagcccggggccatacagggacccggaccgcagcaggtcatggaaaagatgtatcccgtccggacagcggataccgtttacatgacatccgcacgtccgaaggaagggccgggaaaaacagaaactccaccagtacatggcggcccagagccgccatcggaaaaagaagagccgtctttttgcaacagttccgtgaaacaataaaaaagcggacattcccaccggaaatgtccgccctgctgcctgccgtttgaaatgtattttttccgcctctctcacttccggcggcgcaccagcagcgccatcagtcccagaacgctcaaggaggcggccgctggttcgggaaccatgttccacgcctccttgatttcctgtcccgtcaatgcggtaccataagccttgaaatccgcgatgctgaagtaatgttcatccgtcgtgcctccgccgacggtcacggttccgttctggcctccgttgagccccgcggacaactggggggtatccacgatgttttccccgttcaggaaaatctggaaatccgttttccgggtggtggtatccgtactgagggacatggagaggttgaaccatcctccatcaatgacgtcctgcccaatggtgaaagtctggcccgcttctcccgttctcctggaagtaaacgtgccgtccccgttgtaaacaagctggaggccgcggagagaatccgtctctccaaagctgtaaatagtggcggcagaccccagggaggacaaatccagccacatgcccaccgtctgcgtagaaatgttgcggtccccgcccgtcaccgtcgcccagtccgtataggatgccgttgaattgaccgcggaggaaatgctccatccttccagcttgatgccgcttcccgtcatgaattgttccgagggaacgccggaagaaaattcccaggcggcggtagttgcggcgcaggcggaaccaatgccggcagccagcatgatggttaagaatgtctttttcattatcttaaacagagttgatcgtcagttgattgaagggaatatccagaaccttcccttccatgcaaaaccaataccggatttgtaatccggtattgattctacagtcgggaaaagctgtccttcgcgaaactccggcatcgtgggtacgaaccttaattgatattacccagctcctttccccagccaggcggtatgcggcaacggttattgaacggaagcttccgctacgctacagaacgggtttcaaccacgaaaggcgggagccttccgctcccaggcgacggagccgcaaaatcaccgggcaccggcaagcgaaatttgcccaaaccttttttctttcaattttgtaggcttgacttcggattacaaatccgtccatgcgtactatcttctcttccgcaagccgcagaagcagttcgtccggaactgcaattttacttttggtaaagaaatgactttacaattcttaaccaaacggtatattccgtctcccgaaccgaacaccaaaccggagttacacaccatgaaagttctttcttccttagcctctatgaagcgccgccacgcagactgccaaatcgtgaagcgcaagggcacgctgtatgtgatttgcaagagcaatcccaagtttaaagcccgccagggcgccacggcaggtacgcgtctttccaagaagggcgtcaagtaaaccctggcccagcacagatttcaagaagaccgccgcccgccgggtgccggtctttttttgctgacaaagacccttcccgcacatccatgcagcttcccaccgtccaaaccagatttctggacctgcccggctccttttccctgcggaacggcgccgtgctggacaaggtgcgcgtggcctacgagcagtacggcgccctgacgccggagaaggacaacgtgatcctgctgttccacgctctttccggcagccagcacgcctacggttacaatccggaagttccgggcaccgggtccctctggaaaccggaaaaccacgagggctggtggaacagcatcatcggccccggcaagccgctgaatacggaccgcttctgcatcatctgcgccaattacctggggggctgctacggcaccaccggaccggccagcccatcccctgcggacggcctgccctacggctcccgtttcccgcacgtggaggcggcggaccaggcgcgcctccaggctcttctgctggacagcctgggaatagaacgcatccatctggcaggaccgtccgtaggcggcctgatcgccctcagcttcgcgtgccagttcccggaacgggcacggagcttcatttccatcggctccggctaccgggcttccattgaacaccgtttgtccctgtttgaacaaatcctggccatcgagcttgatccggatttccgcgggggcgactattaccagggaccggcccccaaaaaggggctggcgttcgcgcgcatcatcggccacaagtcgttcgtataccaggaaggcctggaacagcgcgccagaaaggaagtggggggcaagtccggactgctcacatggatgacacccacccgcagcacacagagctacatgctgcaccaggggaccaagtttgcggaacgctttgacgcgaacgcctacatccgcattgcggacatgtgggcggagttcgacatccgcgaccacgctccggacggaacgtttaaaaccgctctggaaggcttccgccgcgcaggaattccctcgctcgtcttttccattgatacggattgctgcttccgcccggcggaacagcaggattttgtggcgcagctggaatccgcgcgcattcccgtggagttccataccatcgtttccaccaaggggcacgattccttcctgctggagccagagctttacgcggaacccatccggcgcattctggcggaagggcacccggaacacactccgtaagcttttccgttcaagccggggaaacctccctccccatccgttctcctgataaccgcatccccggaaacaagggcccccgcccttgtaaagcgattcccacaaacaaggaggcgccacgggtccgggcaagcccggaagacggattgacagcaaagccctccggctttagtctccctgtcaaggcaccggacgcttccggcgaatcatgaaaactgcgaattccccacggagcatttcatggcagccgcacaggagccgtccaccagggaaaggaaggatatgaactattattttatcgtaacggtttctttaagctccgatgcagacactacatacgattcctacatcagggaagtgaagcccattgttgaaaaacacggcggcgaatacctggtcaggaccaatgaggtcattccgctgagctccgggtggaagccggaccgcgtgatcgtcatccgttttccctccagggaaagcctggaacgctgcttttcttcggaagaataccggcagatcaagtcactgcgtgaagattccgttgacagccacgccatcatcgtgaaaggaacggatggtgatgaagctcggtgaagggctgcatcagatcaggattgatttcctggcaagcacaggagaacggggataagggggggctttgccgcgcatgccggaatggaccggcacccctgcaaatcggatttccgcgacggcccaactaaaaaaataaccaaattcaggtgaactcgatccagggttccgctgtcacactcctatgactgatactcattacacctccgagacggagaacgtcgggcaattccgctgtgaaaccacctacattccctccaacatcacttttgccacggacctgcccgcctcttttgaaggccgcgcggagtttccctcccccggcgtgatgctcggttccacgctcgcctcctgcatgatgagcctggtttccgtggtcgcggccagaaagggcgtggacctgaaaggcatgcgcgttctggcgcgcgcggtggaatcctccaaggggattgaaaagattgagctgaaggccgtaatgcccctggaaagcagccatcccctccgttccatgctggaaaaaacggccatgagctgcccggtccgccaggcgctgaggccggacatggaaacgcccgttgaatgggaatggaagtaagccgcccatgagagggcggaaatcactcttcacgttatcctataaagaaatcccgcccattcacgaagaaggccgctgcggattattccgcagcggccttctgattaactgacgttttcttcctttagaagttgtagcggtagccgatgcttccgttgatggagctggaaccgctgcggatgtccgcattgccgtccacgaagatgacgccctgggtgcctacggggacgctcagccccacaccggcctggaaggccgtgcttcccaccttggcgccgtacaccggacgcgtgtaggaggggtccgccaggaagcccacattggcctgcccgcggcggtcgcccatgtcctgggagacgttcacccggatttcacccagcgcttcacgcccgaagacgttggagcccatgaggccggagagtctggcgcccacggcgactgcggccgtggtcagttcctggtcctccaccctcagcccggcatttccggcggagccgctttcactgtagccgtccatgcgcgtcgtcacgatggaggcgttgaacaggggctggagaatcacgctcttgtcttcattgagggcgatgtcgtacgccagctcgtacatggcgccgaagccggacccggtggtactgccgtgggcctggtaggagcccgagccgtaatccaccgtgcgcgtgagtttggcatcattccagccgcccgtcaggataagcaggtgggaccatttgcgggactggtaccgggcgaacaggttgacgtagtagctgtccaggtcaccgtccgcggtatccgccgcattcgccgtgaggcttccgtagttggccgtgaaggccgcgccagcggtgaagttgtcgttgatgtccacgtccatgcctaccgttccgccccaggtggtgagctcatagccgctttcatcccccttggtgtccagcttggcataagacccggtgccctgcatccacatgtggaagtacggcatgtcctcatggacgtacgcggggttcacgcccatctgcgccacgcggttgcggatccagcccatctggtcgcgcagggagtcacgctgggcgatgcccaggctggtgaccgtgctgcccgcggcggcggccagcttgcgggccgcgccggagtagtcgcccgcgttctgggagagcagaacggaggtgtagaagtcgcgcagggtggtgccttcctccatatggtagcgggagttccacagcaggtccgccccggtggccgcgttccgcgtcagggaggagtcacggaagatgttttccgtgcgcgccgtgccggtgaggatgatggccgtcatgctgtcattcgtggtcagagacaggttttcatacagggagctgaggatcatgtcctggagggtgacgttgtcgcccagggataccagcgcgccgtccgtcgtcttgaacagttccatgttcagcgtttccgtgctccccgtcaccagggtgtccaggttgctcatgacgagcgtgacttcccccgttccgtcgcccagcgtaatgtttccgctggaggtgacgaaggggttccccaggccatccaccgtggtggaggacgtggtgatggtaaccgtgctgttccccgtcacgctcaagccgtccgtgccaagagtcaactgggtcttgggagcgtccgcactgccgatgttgagcgtgcctccgttcactgtaatgcccttgtaggcagcctgggcgggattgccgccttccgcagccgcgccggccagggtcagcgcgccgccgtcgctcacgttcaggttgtagccggcattgcccgcacccttgatggtctgcacgctgccgttgccggatttgacgttgagcgttccggatgcgccgtccagcgtaccggtgaaggtatgggaggcggaggagtccaccgtcatttccgcaccgctcagcttcagggcgcccccgcccgtcaggccggagaccgtgttcacggagccggccgcggtggaaagcgcggaaccttcccggatgtccagcagaacgccgtccagggaggagccgttgcccagcgtcagggaggagtccgttcccgttcctccgagagtcagcgtgccgtcaccggaaatggtcacatcagtcacatggctgccggcctgctggccggtgaggaccagctgggcgccgcggcccaggtccagggttcctccacccgtgccggaggccaggttttccaccgtcgtcacgcgggaggcgccgtcattcctgccgcccagcgtgatgtctcccccggcgagctccagcgtagtgaggctgttgcccgtaccgttcaggacaatgttcccttccgtggagctcagcatggagtcatttccggtgaagctgccttccacggtgagggtttccgctcctttcttgataaagtccacatggtccccgctgatggtgccgccgtagctgttgcctccggcgtcaacgttctggatcaggtctaccacggcatggttggcggcagcgtccgccgccgtattcgtcaccaccagagcgccattgctgccgatcaggttgctgactttcaggccgtctccgttccgggaggcttcaggagcaccgttcaggcttacattgagcgtggttccgttgatgcccacggccttgtagggatccagggcggcgtagtcgctgatgttggggttgtccgagttgggcgtggtgtccacgaggtagacgaggtccgtattgccgctgaccatcagcgttccgtccgcgcccaggacttccgtcacggcataaccgagggaggccagaagcggggagaaggctatctgcttgtagttgtccacggtcagcgttcccgtcgtcagcaccagccctacgccgtcggcggaatcccggttggcggagagcaggtccaggacgccctggttgctgaggttgatggtcgtgttggcggcggagagcgtcaggctgtccgcatcaatgacgccctgcccggttgttccgcccgcggtaaggctgccggaatccagtttcagcgtcaccgtctttcccgtcatgtccaggccgccggagatgccggtgagccgggagtattcttccatgacgatggagccgaccatggagccggacagaccgcccagattgatggtgttcagggcgccctgcgttccggcggaagcggccacttccacgtttccggtggttttagctcccgcgtttgccaggcttcccttcgtgatcaggatggcgttggccgcattctgggaggccaggtcaagaatcccgttgttgacggtgacccgcccggaccccagggagtcggcccccgcgagggtgacggtgcccgttccggagagcgtagtggaaccggtgaacccggtgttgccggccgccagcgttatattccccgtggtgtcgacgaccagggaaccggctccggagagggccccggcccaggcgctcccgtcacccagccgcgccgtagcgccgcccgcaatggagagggtgcccaggaaggtgttcgctccggtgagctccagcgttccggcgtttacggataccgtgctgccggccgtgccgctgatgacgccgccgtaggagaagtcgcgggcaaaggccagcgtggagttgttctggatgtcaatgctgtcccccagcttggtcacattggcggagttcaccgtaaccgtgccgcggtgcaccttgagctgtccgtccagattgacgccgcccgtgagggtgatgttgcccgcaccctgggtggagaacgccgtgccgctcagatctccgctgagggtgaagtccttggtggcgaagacctggttgcccgtaaagacaatgtcattggcaaaggcgcccccggccgtgccgttccattccgcacggacattggagtccgccaggttcacggtgccgtctgctcccatggtcacgttgttcaattggaagtaaccggatgtcacggacagggttccctggaatgccgtgctcatgttcaggacattggctccgtagctggttcccaggcccacggaaatggtgccggtgccggaggcatccaggttcagcgccgtgttgtcattggcgccgctgaccgtcagcatggagccggcggccagttccacggtttttccgttggccagggccttggcggcggtagccgtcacattttcacccaggatcagggagccgtccgtccacgtcatgttgtctgcagtgaacgccgtggcaaaggcgccggacgccagattgaggctcccgccctgaaggttgatcatgcccatgcccggctggacgtcagccgtcgccagcgtgagcgtaccgcccgtaatggtgacagccccggaaccgagggagttggccacctgggccaccagctcgccctgctggagggagatggctcccgcccagcccgtattgtccaggttcagggtcagcttgccttcgccacgcttggtcagcgtgccctgcgcaatttttccggtgccgtctgaggcgaatacatagtcgctgcccgcggcgttgttcaccgtgatggaggccggattcaccgcgccggacagggtgacggttcccgctccggagctgttgaagaccaagttctggccggcggccgtatccgcagagccgtcaatgccccactgggctcccgtgttcgtgtcgctccaggtcatgccttccgttccctgccagatccaaacgtccccggcggaagtcaccaccaacttgagggtggtgcccgtctgttcgagcgtgtaaatcagcgtttcgtctccggtatagccggcccagttgaagatggcgctggcggcatcaagtccgctggcagcagaaatcagggtgtattccccggcttccgtaatgccttcaaggccattcagggtgaggttgaacgtaccggccccgaaggccccacccacgccgatggaagagcttatatccagggtcagcgtggaactggccgccagattcagggccccggcggtcgtcatccgcgtattggccgccatggtgatgttccccagggacgtggcccctgcggcagtaagggcaagggttccaccctggatgttcgtcagccccgtgtagctgaccgttccgcccagcgtcagggtttcatcgctgaccttggtcagggagaggactccggtggtgtcataggagatggtggtggctccgtaggcgatggcaacgccgtggtccgtgatggtgccgttatacgtgccggaacccaccgtcagcgtacgcgctccccccacggcgcccacctgggagttggccgtgccgtccagggaggcgatttcaatatcccccagcacgcgcatgaaggcgaatcccgtggtatccgtgccggacgtgagggtgaccccgccctgcgccatggaggtgcgcatgtcaagccccgtgctgtacccgttggcggcgttcatggtgatcatgccggtaaatccggaggcgtcaccgccgatgatgagcttgccgttggagttgtacctgccgtcgccccctccgcggctgtaggtcagggagcctgcgcctgtaagcgttccggtgaagcccatttccttggcccagttgtcccggcccaccagggtggccgccccgttgacggtaacggttcccgtaaagttatgctggtaattggtggcgtttgcctgggaggcgtccacccatttcagggagaccgcgtcagatgcggccgtgcccagaatcagatcggaaccgatggtgtggtgggcgctgttgcccgcaatgatcagggacgtgccgttctgcagggtgacggaggaaccggcgctgccccaattgatggcagtggagccgccccctatctggacgttgccttcctgcacgatcaggtggccggagttggcccccgtcaatttcagcagccccgtaccggttttccggacggagccggctcccgtgatgttattgccgaaggtaaggtctgaaggcgttaccagattaatgaatgagttggtatccgcggcaagggagaacgccgggttggtcacggttcccagattcaccgtgaccgtcgcgccgttggccgctcccagggaggaacccgcgccccaggtgatgcccgtggccggcaggtccgtatcatacccgaacgccagaacgccctggttcacggctacggtggttcccgtaccgaggatggaagcggagcccagcaccagggttcccgtgccttccttggtaacggcggtattggcaattactccggttcccgccagctcatagcgggtggtggtgttgcggaccagcatggagccgggggaaacctcggaatcaagctgcaccgcggaggtggcgactccggcctggtctgcaaaggaaaccgccaggccgtccgcatacgtggcgggcgtgccgccgtccgtccagatgttttccgcgctccagaccccgttttcaccgcccgcccacagcaggagggtttccgccgtgtaaaccaggtccctgccattgttggaaagggtgatggttcccgccacgccgtccgcaaagacggccttgatggaagagatgttggtcagtccggtggtggagagcacggacatgccgtccgtcaaggcgccaaacccggtaaggtccagattcaattccccttccgcggaaagggcgaacgtgccattcacgttgattcccgttccggcgcctcccgccagggccagcgtgctggagccgtccacgttcaggttccccgtaaagaaggagttctggaacatggtcacaatgtcgaagccggtaatgaccgtattggagaaggagatggcctggtccgccgtattgccgtaaccgcccagaagcagggaggaggtgccccctaccgtgccttccgacacattcagcgtgctgcccgctcggaacacggcttttttaacggtgagggtggcgttcccgttcacggcggaccttgctccgccgccgcccgcataaagggctcccgtataggcgccgccatccagcgtcaggttggaattgcctctgaccgtggaagttccggcagtgccgtagccgccgccgtaaatggccccggtaaagacggcgtcactggcggcagtgatgctgacgttggagtccccgttgatcgtatatgttccggagctgcccgagtaggaaccgcccacgatgctcttgacgaaggtgccggaggcagtccccaggtcaatcgtcacattggtgcttccggtgatggcggcgctggaagtggagttggcttcataggcgctgccgccgatgatgaagcccctggctacggaattgagcgagacggtttcatccgtcacgctctgcatgctgcgcaccacgacaaaggtgctgccgtcaatgttgttggtggagttgtgggccgcggtgccgccgcctatcacgctccccttgaccacggcatttccgtccacggacacgtaaacgttccccgtaatgccggcagcctggccgtccttgtagttgccgcccaccacccagttgacggaggtatccccctgaatctgggtatggacgtcacccgtgatgttccacttgccggtgccgctccagttgttggcataactgccgccgatgatcaggccgtaattgcccccgagcacatccgtccagatgccggtagtgatctccgtggccgttgcattggttgcagtgttgtaatagccgcctgccagggtcactcccgtcaggtcacccgttccggtcacgacgttcacggagccgaagccctcctgcatggacgcggcgcgaatgttgtacagggccagcgtctgctggtccgccagtgttccggcgccggaggtgggggcgttttccagcctccaggcggaatcccatgcggtatcatacgcgccggatcccgtgaaggtaataaccgttttcccgtcaacggtggtgatggtgtacagggactcgtcaatatccgccagcgtgaaccccgtccccaggtcaacgcccagattgtaggaggtattcaccagggcttcggaaccgaacaggtcctggaattcctggaaaccggaaaaatcaatcaggccggaagtcagcgtcacgttctgaagcacgctgcccacattgtccatggaggtgtagtacaggcgtccgccgtccaccgttacattgcccgtaatggttccggaaccgttggcgaggatgcccatcgtttcccccactgtgaaggcgtcctggaaattcatggtgcccgcggaggcggagatggttccattccccgtcagtcccgtcacattcatggttccattgcctgcatccagcctgcctcccgcaagcgcggcgctgatggcgccggtcttggaaagtacggcgccggaattgacggtgtaggtgcctgtaagcgctacgttctcggacagatgcacccagcctgactgggctacaaagttgcctgccccggtgatggagttgtcaatgacgtccgccgcttctcccgccgtaccgtaataagtgaggtactggctgccggaggaagtggttacggcggcagtgccgagggaaccggaagcgttgatgcccagggaagtggagttgcgggtgatggcgatggtcccgccaatctggttttccgtgccggtcagggtgtaataagtgtattcgctatcggccccgctgatggaaaagccggaggcggccgtaagcacgcccgtgaatttgatgttcttgccgtactgggtagtgaggttcactccggtgccgaacgtggctgccccggagaaggtaaagccatccccattgatggaagtggcgtcatagttataatatccggaaacggcggggccgtcctgcacggtgagcgttgtgccgtcccccatgaccagcttctgtgaccagttgacattgccggaaaacagggaaagcgttccgctgctgattttaagagtggcatccgcggaagcggcaggggtcagagccacggtcttgtcggaattgcccagggtgaacgtgccgccccccgtgtaatcaaccgtcacggtgccgccgaagcttccgccgtaggaggaagaatccccggtgatggtcagcgtggttccctccccggtaatcagggcggcggtgttgttgtgctccagcttgctgatggaggtgttcacgcccgcttgcaggacggaagctccggtcgtatacccgtagccgcccagcttgatggtggcgttctgggctgccagcgcgtggttgaggttcaggatgttgttctgcgtcccccccgtcgtgttggaatagagggaaataatgccgttgaaggtgcccgccccgttcagggtcagggtggagagggccgttcttccgttggcgacgcggtttaccgtcagcacggcttccggagcgtctccattcaaattggtgatggtggccgtgccggctccggcaaaattcaaggtggtggaagccgtgacagtgcccacttcataggcggaagtaccccccgccgctacgttaacctgcgttccgttaaaagcaacgtccgccgcataagcctgtgatacagttattaaaagaccagagactcctgcaaaagtggcagttccaagtgttactcctgagaaggaagtcatcagggcagccagcagattcaagggaaggtgcaatttcatgtaacgtttgacaattaagggtttataaatcataaaagaacctttcccacaacacggcaaggggaatatgattgtgaatataaataaggaattcgcaatccgctgtcaaaggaaaagagtcagttgcaacggttttctaacagtacagaaatattcccattgacaaaattttccaagttcgctctgaatggattattttggaaatagataattcattgctcgttaaacgttattcaataattgaattttgaataataggtgaatatggagacagcggattgcgaatccgcatttgcccttttaatggcaggataaaataaaaagatgccctgcaacaggttatgaaggaatctgcttggagattgaggaagaatgactggatatgcctctggtccattttccaaaatttcccactctcgcagttttgtaaagcgtctgagcagaactccggggcacggctccgcacgaacggaccgctgaaccggcgtccgtctgaaacacaggaagagtgaacggatccggaagagaaacggacttgcaaggccgagcccccttgttcccgggagaacggccatcagatagcttggaggactccatggcttgaacgcgttttcccggctttatcaatcaatctcctccaagcacaacagaggaattccatctgtttattccttccggggtcctatgattattttctccttttccggcatgtgacggatttctaatccgatgtcaatcctactacaatgatagggaattattttaagacaaattcctcttctgaaatagagcgctgagcgaaaccccttcatctttcagaaccccatgcttcattcttttcttttttgccgcggcaaatttcttaatgccccaaaaatacttaatcacatagaaatacatagttttccaacaatcaatcctgttacccgatatttctcaaatggtacctgcttgagtttcttcctgcggctgaagaaaaatacggattagaaatccgctatttagttctgctctttgccataaggctatatttattcttattattgatcatgaaacccatccttcctttgttgctgcgccgcagcctcctggcctctctgctggttcccattatttccctgtccttctccgcctccgcggcggacttcatggtagacgcatctcaatattccgatccaaacaataacatatactccaccctggaggaactggtctcctccgtcgccctagttgccggggatacggtgattctgaacaacgatgacgcctccctgactaccggtctaaccgttcctgtcaacttccgctccgctgatccggctgcactctgtgccgtagacttatccggcctgggtaagaatcccttgtacaacctgggagcgggagagtacacgctggagatggactccgtcatctggagcaatggcgccgcaggagtgatacgcacagcagatgataacgtatctctggaaatcaccggagaggttcaatttctcaataaccatgttgataattcaaacaatagtgcttacggaggagctattgatatggagggagaccatgcaacgctgaccctggggaacaacgctaccttctccaggaattatgctttctcctcctccaactactcctcttcctcctcctctggcggagcgattgctatgagtggagattatacaacggtgactctggaggacaacgctaccttctccgggaattatactttctccgactccacctcccacttatccaactacccctccacctcctttggcggagcaatttacatggagggagaccatgcaacgctgaccctggggagcaacgctaccttctccgggaattatactttctccaagtccggcacctactccaccgccaccaccgccacctcctctggcggagcgatttatatgcgtggagaccatgcaatgctgacgctgggggacaacgctaccttctccgggaattatgcttactcagactcctcctccaactactccaccaactactccaactcctctggcggagcgattcatatggagggagaccatgcaacgctgaccctgggaaacaatgttaccttctccgggaattatgcttcctcagactcctactccatctccacctcctctggcggagcgatttatatgcagggtgttaactctttcctcacgatctgtaacggcgccatcttcaccaataactattcctctacctacggtggagccatttacctgcaagggatcactaccgacaattccagccgctttctggcattcacgcatgacgtgctcttcagcggcaacatgaccgggggaacgttcactcaacacaatgacggctccttctccgtggtaaacggcgttgccaacgccattcatgtagacggaaccaaccatctccaactggccgccgcccaaggaaaggaggttcgctttaatgatccgatcaccagtgcggcttattttagttctacggaaaacgtcaccctctctctcaaccagtacacggatgatgacggcatctcccacactacggatggcactgtcatcttcagcggggaactctaccagggagacgacgcccacctcgtggccagccgctacagcgatttcaagggacaaaccaccctctacggcggctccctcatcctggaacacaatgtcgtcttcggcaatgccggcctgcgggacgatacctccatgactctggaacacggcactctggaaatcaccgggggcagcgtcatcaatgccgcctccttctccatcaccaacaatgacgtcgtcctgcgccccggaaccagcgccttcatcaatgccaaaaacgtggatctttcccgcggcttcgtctttgacatgcagaagcaggcgcaggaagccgcctccctggcaaacgccaccggactttccatctccgccaccggttccttcatcctgggcggatccataggcatcatggacacgggcactaccgcggactacttctatgcagacaattcctgggcgcagcagcgcgccttcattgtcctgacggatgccaaccagacccacacggatgacttctccggcgcccattctctggctaccgggtccgaccgggtggacagcccctatgcctacacgggctcctggagccaccagtgggtagatgcggatggtgacggcttcccggaacaactccaactggtctggactcccgccgaggactccgccatccgggacatccttccggaactggcaggtaccctggccatgaactccatgtggtccagcgccgccaacgcgcttgggatgtcccgggccgccttgggcaacctggatgcccagcgcttcatcaccgggccggaaaacaactactgggtcaagggcatgggggatttcctcaaccacgcctccgagggagtacgggacggatttgactaccacggcggcggctattccgtgggagcggacaggagaatcacttcccacgctatcctgggcctgggcttcggagacctgtacggcaagatgcgcgggcgcagctttgcgggagatattgaccagcagacgcgcatcggcatgctctacggcggctggcacaaggttctcaacaggaagaatacgttgctggtgacgggaacggcaggctatggctggacggacaacaagatgaattccttccacacgggcggccggtcccacggcaagtggaccaatgaaaccctgtttggaacattcaccgggaagtggagccgccgggtaaacgagaccgttgcaatggaggtcatgctggggctggagtatacggacgtgacgcaggaggcgtttacggaaacgggctgggacgcgaggcgctttgaaaaggggcgcctgaagaacctgagcgtaccggtgggagtgggcttgacgcaccgcagtgagctgaaagaccgggaatggatcaacagcgcgatggtgagctacgtgccggacgtgtaccgcaggaacccaagtgcgcaggcggagcggctgctcaacgggtaccgctgggaagcggaaggaacgtctcctgaccggaacggggtgagagtgaacgtgaacagcgccctgcagttgaacgcgcgctggaggatgtatgcagggtacgagtttgagggaaggagcaaggccacggcgcaccggtttaacgccggcgtcagttatgcctattgacagagcctgattgcaggcgccggaaaaccgtcaaaattactttatctttgacgggcggccagcagcaaagaggctgtgcagttattctgcacagcctctttttaacgttaacgagaaatgttattttattttccggtccatttgcccaggaattccgccgcatccttcccttccgcaatgtgcctgagcagggcgctgccgaggacggcggcgtccggacgggcgtcttccggcagggcgtcaagctggtccggcgtctggaggccgaagcccagtgccagaggcacgtcaaatacggcccgggcgcggcgcatggtttccgtgacgctctgcgtcaggtccacctttccacccgtggtccccagcacggaaaccacgtaaacgaagccggaggtatggggcttgtattcccgcattcgttccacggaggtgttgggagccaccagcgtgacgagcgtcagtccgtgggggtcaaaggcatccctgaagatgccggattcttccagcggcatgtccggaacgatgaagccgctgactccggcttccgccgcatccagggcaagccgttccagcccgtactggtaaaaggggttcacgtaccccatcagcgccagtttggcgaaaaagcggcccttgcgggctttcagaccgtccagaatccatttcaggcttacgccgcgggccagcgcgtcccgtgaggcctgttcaatgagaggaccgtccgcaacggggtccgagaagggaacgcctatttcaatgatgtccgcccctgctccgtcaatccgctccagatgggtccagaaggattccttgtccggaaatccggcggtgatgaaggggatgacggcgcgcctgccgagggaatgggcgtgctccacggcttcctgcaacggtgatttctgcatgttgttcatggaaagatgctgcttaaaggttcagatattttttaacgatgcccaggtccttgtctccgcggccggagaggttcaccagcacgtcaccccccgcgggcagctcgtccgcatggtccagcacccatgccacggcatgggaggattccagggcggggatgatgccttcctcctgcgtcagggtctggaaggcgttcagcgcggaggcgtcacagatgacgccgtaatgcacccggccgatttccgccaggtgggagtgctccggccccacgccggggtagtccagcccggcggagatggagtgggacggctgtatctgcccgtcttgatcctgtaaaagcatggtcacgtggccgtgcagcacgccggggctgcccaggttgatgggtgcggagttgtaacatccgggctccccggtgcctccggcctccacgcccaccaggcgcacgccttcatcttccacaaaggggtggagcatgccgatggcgttggaaccgccgcccacgcatgccactaccacgtccggaagccttctggcgcgttccagcatctgggcccgggcctccgtgccgatgacggactggagctgcctgaccagcgtggggaacgggtggggccccgccgccgtgccgaagcagtacagggtgtcctcctgatgggaaatccagtagcgcagggcctcgttaatggcgtccttcagggtgcgggaaccgctttctatcgggaacacgcgggcgccaagcagtttcatgcgcatgacgttcatggactggcgctccacgtcctccgcgcccatgaagatggtgcagtccatcttgagccgggccgccgccgtagccgtagccacgccgtgctgccccgccccggtctccgcaatgaggtgggttttccccatcatcctggccagcagggcctgccccagcgcgttattgatcttgtgcgctccggtgtgcagcaggtcctcccgcttcagccacaggcggaagcccagcttttccgagagatgggggcagaacgtgaggggcgtttcacggcccgcgtagttgaccagcaggtcctggagcgcgtcccggtactcgcgggacggcatgatggtggccatggcttcctccagctccatgagcggggggcgcagcgcttccggtacgaagcggccgccgaagttgccgaaatatccttctttgttcatgcgatatggtaaggggtgtaggagatgagtgatttaagggctgccagcagcttttgcgggcttttctggccggggatggcttccacgccggagttcaggtcaatgccgttcggggtgcactgctccagcgccttgttcagggaggcggaggaaaggccgcccgccaggaaccagggccggggggatttgagagccgccagggcgttccagtccagggagacgccgtggccgccgccgtggctgcccgcatccagcaggaaccaggcgcagctgtccgcccagagttccatttccttctgaagggccgccagggattcataccggtccggccacagcacgcggatcaccttttccgggcctatgcggcgggcgcagtccagggactgggcgccatggagctgggcgaattccagccgggccgttttcatgacgtccatgatttcctccgcgttctggttcacgaagactcccacgcggcggatcagcgcggagtccagggccgcggcgcgtgacggagcaatataacgcgggcttttgggatgaaagatgaatccgcagaaatgggctcccatccccatggcggttgacaaatcgctctggcgggtaatcccgcacaccttgattgcgaatgaatgcttcttcatgttgtttcttctaaaattgcagccagtttttcacccggctttccgccgtccatcagggcagtccccatcagtacggcctggaagcccgcttccgcggcttccctgagatgcgccccggcgctcatggcgctggcggcgatccacacctccccctcacggcggagtttccccatgtccaggcaggcagtcctgtccgtttcaagcgtatccaggtcacgggcattcacctggatgatgcgagcgccggattccctggcaattgccaggtccgactcgtcaaaaacctccaccacggcatgcatgccgtaggcttccgcctgttccctcaggatgcggagcgtccgcgcgtccggcgtcaggcgcacgatgagcagcagggcggaagccggggtggaggccgtctccatcacctggagctggtggaagatgaagtccttgcggagcagcggaagcccggcgcggctcatgcgctccagatacccgatgcggccgccaaaaaattgttcctccgtcagcacggagatgcaggaggcgcccgccgcggcatactgttccgccacttcctccggtttcagcccggtggcgatgacgccgcgcgacggggaggactgcttgaactccgcaatgacggccacggactgcccggcgggcggctccgcgatggctttcaggaagtccggcctgtgccccttccacgggtgcggcagctcccggcgggaggccatgtccgtgagcagggctatttcctccgccttggcttccctgaaccggtcaagcagcatgaagcgttctccttcctactccggcgcagacggcctcacgggccttcgccatgcagacggccaggtccatgtggtcctccagcaggaacatggccacccccacattgagaatcaccatgtccatcatggcgcgcgggcctttccccgccagaatgtccttcagcacggccacggcttccgatttggaccgaacggccaggtcctccggttcgcagggctggatgccgtagtccgcggggtccagggtcatgggcgtcagcctgccgttatggacgatcatcatcttggtgggtcccagcggcgtcacctcgtcataccctcctgcgccgtacaccacggcggccctgcggatgtgggactggctgagcgtctccgccagcagttccaccagctccggacgggccacgcccagcaggatgtgcgtgggacgcgccggattaatgaggggccccagcaggttgaacagggtacgtatgcccagctccctgcggatggggcccacattgcggaaggcgggatggaaattgggcgcgaacaggaaggcgaagttccgctcgtccagcaggcgctgcacgtcctccggagccacgtccagcgggaagcccaggccttccagggcgtccgcggagccgcaggaggaggacacggcgcggttgccgtgcttcaccaccttgtaccccattccggccagcgtcagggacgtggcggtggagcagttgaaagagctgcggccgtcgccgcccgtgccaaccacgtctatgcagtccccttccagcccttccacacggttggcgcggcccagggcgatgccgacggcatgggccatctccagcggggtctctcccttcatgcgcaggcccatcaggaagcagcccgcctgggccggggtcatgcggccgtccatgatgtccgcaaagcccgcggcggccatgtccgccgtcaggtcctgcccggcggccagcgtgtccagaatgcggttgatgcgcttttccttctgccctgccggaacgatgttgtccgggaagttgcccaggagctggaggccgtccggcgtcaggatggattccggatggaactggatgcccacccaggggcggtcattatagcgcagggccatgacttccccttccggcccgcgggaggtgacggtaaaacggggattgggctcgtcctccttggactggaccaccagggaatggtagcggcccacggtcatggggttgggaaggccggtgaacagccccgaaccgtcatggatgatgtccgagctctttccgtgcatcacgtacggagcgcgggaaacctccgctccggcgaagtagcccaggagctggtgccccaggcatacgcccagcacgggaacggcggcggggaggcgtttcaggaactccaggcacagcccggcgttgcgcggatggctggggccgggggaaatgcacacggcctccagctccgggctggccgccaggtccagaatgcgcggatcgtcattcgcgtacaccacgggcttgcggcccagggcgtaaaacgcctgcaccagattccacgagaaggaatcgtaattatcaatgaacagaaacatggtcttctcctttcaaaataacgtcaataatcttgcccttgttcatgcactcctgccattcggcggccgggtctgaatcgtacacaatgccggcgcccgcctgccagtggatgcggccgtccttcacccacatgctgcggatggtgatgccggaatccatgtggacgccgttcctgtccagccccagccagccgatgcagccggcgtacggcccgcgcggcaggggttcctcctccgccaggatttccatggcccgcaccttgggagcgccgctgaccgttccgggggggaaggccgcgccgaggatgtccagggcgtccaatccgtcgttcacctgggcggtcacgcgggaagtcatgtgcatcacatgggaaaaacgttcaatctccatcaggcgttccagcttcacggagccgggcttggcgacgcggcccaggtcgttgcggcccaggtccaccagcatcacgtgttcagagcactccttcgggtccttcagcaggtcggcggccagtgcggagtcttcctcatcgtccctgccgcgcttgcgcgtcccggcaatgggggagagctggagcttgccgtccgtgcaccgcaccatcagttccggggaggagccgaacagcgtcacctccggcagacgcatgaagaacatgtacggggagggattgatgctgcgcatgcggcggtacagcgtgaaggcgtcaccgtggaactccgcggaggcctgggaggaaagcaccacctggatggcttctccgtcatggagcagttccttgatatgctccacgcccttcatgtagcccgcctggtccggcgtgcgggaaacctccccgacggaaggttcttccgtctcctgaaggggcgcgtgggacaggtcccggtgttcgcccaggctgatctgggtgaggcggttgtacaaatggtcaaacacgatcactgtgcccgccaataccaggcaggattccgcggaagagggactgatggtctgcgccagcttgggctggaacagggcggcggtttcatacccgaagtagccgtacagagcccgcgtgatgggagcctgcctcatgtcgtcccccaccagttccagacgctgcatcagggagcgcaggccgtccaggtaaggcatgccttccagctccttcagggaagcgagccggtcatcgctgatggaaagggaaagcctggcgtccacgcaggaaacggtcatcaggtaatcgcaggcgatgacgctgtagcggccccatctgccatccacctccgcgctctccagcagaaggccgggagtttggttctgggtcaggctcaggaacaggctgatgggcgtctccaaatcggcgctcagccgccggctgcgctgttggagggtgatgatggatggtggttgcatggatggatgatggtgtaagttgaaaataaaaaaactgctttgactctcggaggaatcaaagcagttcttgaaaaacggtcatagctggatgctactactgcacatcgggattcccccgtccggacatgggtatacgccaccaatagccgttgccataataacgggtcgtgctaaaaaagggctgtccagtgctgaattgcatctgcgcgtttattactcctcccgcccggcgttgtcaaaaaaactttccgtcaatggcgaaaaaaatccacggcgtccttcctgccgccggaaaaaaagcccgtggattccactgaatccacgggccttgaacataatgactgtcaacctttagaacagcgtcacggcaatattgacgccggcggtgacgatggccaccatgctcatgagcttgatcaggatgttcagggaggggccggacgtatccttgaaggggtcgcccacggtgtcgccgatgacggcggccttatggctttccgatcccttgccgcccacgtggccctgctcaatgtacttcttggcattgtcccatgcgccgccggagttcgccatgaacacggccagtacgaagccggaggccaggccgccggccagcagcccgaacacgccgggaacgccgaacacgaggcccatgcagatgggggtgatgaccgccagcacggacggccagatcatttcatgctgcgcgcccgccgtggagatttccacacagcgcacgtaatccggttccgcttccccggtcaggatgcccttgatttccttgaactggcggcgcacttccttcaccatcttctccgcggcgcggcccacggcgttcatggtcaggccgcagaacaggaaggacatcatggcgcccacgaaaaggcccatgagcactttcgggttcatcagggtcacctggaagtaattcatgaattcaggcagcgtgcaggaagctatcttggacacttccacgctcaccgcgtcattaatcttgtacatggtgtttccggtggcgtccccccaatgctggatggaaatcttcagctcttcaatgtaggaggccagcagggccagcgcggtcagcgcggcggaaccgatggcgaagcccttgcccgtggcggcggtcgtgttgcccagggcgtccagggcgtccgtgcggcggcgcacttccgggtccagcttgctcatctccgcattgccaccggcgttgtcggaaatggggccgtaggcgtccgtcgccagggtcaggcccagggttgaaagcatgccgacagcggcaatgccgatgccgtacaggcccttgctcatttcagcgccggtgaaatgccagtccccggaggccatgccgtaggccagcacggtgcccacgacgatggtgatcacgggaatgcaggtggaaatcatgccgatgccgatgccggagatgatgacggtggcgggccccgtcttcgcgctgtgggcgatcttgcggcagggataggagtcatgggaggtgtaatgctccgtgctcttcccgatgatgatgcccaccgccaggccggtgacgatggcgccccagatgcccgcccagttgtccaggccgatgagctggagcaggaaggcggaggcgatggcgatcaggaaggagctcaggttgatgccgcggttcagggcggccatcagctccgtctgggaagcgccgcgctttacgcgcaccgcatacacgcccagcagggagagaatggtgccgagggcggcgatcagcatgggtgtgagaacggccttgatcgccatttccggcacggccatgtaagccgcggcgccaagggccgcggatgccagaatggaaccgcagtaggactcgtaaaggtccgcgcccatgccggccacgtcccccacgttgtcgcccacgttatccgcgatggtggcgggattgcgggggtcgtcctccggaatgccggcttccaccttccccaccaggtcggcccctacgtccgcggccttcgtgaaaatgccgccgcccacgcgggcgaacagggcctggagggaggcccccatgccgaaggtcagcatggtggtggtgatgacgaccaggcgcatggaaagctccatgtcttcataaaaccagtccagcacccagtaccagacgccaatgtcaagcatggcaaggcccacgacggtcaggccaagcacggcgcccgaacggaaggcgatctgcaggccggcgtccagggagtggcggcaggcgttcgccacgcggccggaagcgtatgtggccgtcttcatgccgatgtagccggccaggccggagaaaaagccgccggaaatgaacgcgaacggcacccagggattctggatatggaggcagtacgccagaaaagcgaatacgacggtaatcagcacaaagaagatcgtgacgatcttgtattgctgccgcagataggccatggcgccgctgcgaacgtgcttggcgatcattttcatgacctcgttcccctcatcctgggctttcatgcggtaaaaaaagacggccgcaaaaatgagggccagcacggaagccgatgggatgagccaaaataaatcctggatggttatcattgtcagtacactttaaattaaagtggtaggaacataacacctggtccactttactccaagaaaaaacctccgttcggaacggaaaattcaccttcctgcggaaagaccagcaccgcaggaaaatccggcggattcacggaagaagcaagtaccgcaccgattaatccaaattgactccggaggttccggaagcggctgggccgcccctctttccccctgcctacttcttgttacggttttctgctgccggaagccctggaaaacggcaaaaaaccgtggtattccgcgcaatgtgctctccttggccagctatctccggcaattcttgaagctgccctgattccgggaaaactggataaaaagaaaaagcaaacgctcccattggaaataacagcgcctacctgtccgccattccgtcaatgatggaaagctcctccgcggtgaaccgcgtattttccagggctttcaggcaatccatgacttgctgggggcggctggcgcctatcagggccgtggtcaccacggggtctctcaacacccaggccagcgccatctgggcgaggctctggccgcggccccgggccagggcagccaggctgcgaattttctccccatgctcccggacccgttcttccgttaaaaagacggaggaacctgccgcacgggaatccgctggaattccctccagataacggtccgtcagcattccctgggccaggggggaaaaggcgacgcacccggtgcccgtttcacggatggcctgaaaaacggactcttccggctcccggttgaacatgttgtaacggagctggtggaccaggcacgggacgccggcctccctgagcatggcgcatatctgcctggtttgctctgccgggaatttggaaataccggcatacaaggcctttccggaccggaccgccgtgacgagggcccccgccgtctcttccagcggagtctccgagtcatgccggtgcgcataaaaaatatccacgtaatccagcttcatgcgggaaagggactggtccaggctggcaagcatatgcttgcgggaaccccagtccccgtacggtccggcccacatcaggtgccccgccttggtagcgatgacaagctcgtcacggaaacgggacaaatcctgcatgaaaatgcggccgaagcattcttccgccgcgccgggaggcggcccgtaattgttcgccaggtcaaaatacgtgatgccggcgtcaaacgcgccatggataagctgccgcgcattctcgaaatcgtcggcagcgccgaaattgtgccaaagccccagggaaacgggaggaagcagcagcccgctgcgcccgcaacggcgatagtccagataactgtaacggccgggatcggggaggtaactcatcggaaggaaaaacgggagggttcaccgggcatgggacgtacgctcatgccgcacgccggagcgccatgcctccgtgcggtatttggatgccagcagctccgccaccctagcgttcatgccgggaaacagctccgcttccacgcacagggaatgtccgtccgccagacgggcggccagcatttcatcccatccggcgggaagaaggcaattctggatgctcccctgatggagaacgccgccgcggactcttctctggccgccaccggccagcttttccccgccgggaagtactaaatcactcgtcacggggctggcaaaacaggcgcggccaccgtccggggcgtctccgtccagcatcacgcactccacgccgcaatctctcaaaacacgggccaaagccccgtgaatccatcggtacagggtggcgctggaaggccgttccttctctccccggcggtgcatggccaaggtaaaggggatgtcctgccgatggtccacaattccccctcccgtccagcggcggacaaaatggagttcctctcccggaaaaatggcgcgtgccgtggcttcctcgtcaaaataaccgtaggtcacggtcggctccgcccagcggtatgcacgcagcacgggcttctctccccattccagcagggcttcatccacggccatggcttcctccccgcttctggcgaccgggtcgcgccacagcaccagctccggcagaggggacaaattgccgacgacatttgcgaaaccagacattttgcaactacagtgtaaataacggcaggacgctccgggcgggaaacggcagcggaaaaacccgcttccatcagcccccataccacaggcctaacggttcatgggcaatgctacgcgctgggtgaaggaccgggtatagcgctcaaagaattcctccggagagggggcgggacgcttcttctgccggatctggtccaccagggccatgccttcatccgtcacaaccgtcatggaaatcgtcacggcagtgacgcgtccggacttcaaatcgtcaatattcacgctgctgccgatgatgtccagacggttgccgtacacatccatctgggtgcaggaaccgagccggttggcccccgtagtcatgacgggcaccagcacggacgcccgctgcgtggcatccttgtccgacttgttgctgccggaattgccgatcttcttctggtaatccacttcaaaaatcagcgtcatttccaccacgttctccaccaggaaattggcgggaatggtctcatcctgctggtagcgggtataagcggaccaaaggtcctgctggcccaggagattctgcacggtatcctccgcgctgatcaaattgcggtacaaggaataaaccggaaagccgtcagactccgccgtagcgtcctggtccagaatctggtcacggtaaagcagcttgtaccccacgcaattcacgtcaccgatgatgcggtcgttccgcatgtccatgctggacttggcaggattgcggtccgtagccgtggtaaagaaaatcaactgggaggcattcgtgatcttggcgccttccggccccatggtcatcaggttcacgcgggcttcattcagggcggaagaaccgcccttcttcctggacgccgtggtcttggtcgcgcgggaaaccagatcgctgtcccgctgcaccagcatccattcaaagggattaccggcacggaactgcatgctctcaaaatccttggtcatggtatccatggccgtgcgggcaagcgtggtggtccgcacatcctgcagcacccatctccagatatccaccccgcgggaggtcagggccacaatcaccagcaccagcacggtggtgatggtcatggctgccaggagctcaatcagggtgaacgcgccggatttgattttggcaaatgtcttcatgatttttcagaggtcttcagataatgcccgttagcggcggaaagcgagattgcgcgtaaagatgggagtcttcaaattctcccacgtcaggtgctgcaaacgttcagggtccgtattcaacagctgaaaaaactccgcctggtacaggacttccgccccccacggcaaattcaggccgccgcccttctccggcgtataaacgtacagggaaggctccgtaatcaccttgccgcggttgtagggattataaatcgtcccgtacttgggagccagcttgtacccgtaagcgttggaatccatgcgctccaccaccagctgggtcatgcgcacggcgaagacggggccgacaagcgccttgaaatcatcccagcggtccttgttgttcgccaggcaaactcccgtcaccaccgccgtattctgcccggggatgctcccgccttcctccagccagggctggggggtgccgtccttgcgggcgcccttggtcagatccgccctgtaattgtaaacaagaatggtcgtagcgggcttggacgtaaactgcatccagtaaaacgccttgtcaaaagcggaaatatatctggtggtggaagactttctggcattgggagcggcacgctcggaattgcgaagctctccaagttccgccgtcagggcgtggacgatgcggtccgcttcgcggatggtcagagcggactgaaccgtccttctggctggaatgaacatggccatgaacaccacgatcagcacggcaaccacgccgatcgcaagcaccacttccgtcagggtgaaccccttggaacgagactgtttcatacacttggtcaacataaaatgggaaatccggtaaaatatgaattagttgggaatcacctgctccgtcgtcctcagccggctgatattgcctttgggataaatcacgatgccgcctgccaggcccggcttgccgtccaccaccggagtcggtttctcctccttgccgtttccggcggaaccggaaaccaccaccaggcgggtgggggcgttcggctgggacatgcggccttcctcgtcaaactcaatgaaataaatatccgtcatcctgttgcccggaagattgacggtatcctgcccgtcacggctggcaaagctgcgggctgcggacttgcccttggtcttcttggagccttccagcagggtgctgtaggtggggctgatgtaaaacccggcgggaagagtctgcaaacggttgaccagatgccactttccggtgcgcgtatttttggacatcacgcccagggtgcgcatgttgcgggcttcgtcctcaggagtgctcacgataatcaggcggctccacgttcccttgcccatggcgtccaggcgggcttcctgcaccatgccgtccaccatctccacggcggactgaaggccctgccccctgccccctcctcttaacatgctggcggccaaggccatcatggcaaccataatggtgatgacgacaatcagttccaccagggtaaaccccttgctccctgacgaggaacagtgcgaagccgttccggaatgcttggaaaaatatctcatacagatgatgcaggattgaacaacgatttttggcatgctacccgtttcacacggacacggcaatcattttttgagaaacgggaatgccggatatattcctgtccaaataaaaatccggcaacggttcaccacccggtaatcctggctcctttcatccgtccggaagaaaaaaacttccggcagattcaagcctcacatttcaaaaaggataggagaaaaacggccttgaaggaatctcttgaaatcctcttccctatccggctctttcctgcaaagaaaaacacctggatatctacctcaattccacccaaatgccacggtggtcgctggcctggcgggaggggggagagtcaaggatgcccatggggggcttgcggccaaggcgctttttcagggtattgttgatgaagagatggtcaaaggagtggtaggtgtctccgtcttcgtagtagatggtccaagtttccccgcgggaatccctgggtttcaggcggttcaggcggtattccgttttagccggcccctggatgacctgcacggcgctgtccgccggaccgtcattgaagtctccgtacaaaagcagcggcatgccgtcctgggaggcgatggcttcattcaggtagtcccgcagggcatacgcttcccttcgccgcgtgtcttccgcggagccgtcacggctgaggcgggacttcaaatgaatgcccatcaggcggaagaggcggccatccggcgttttcaccgtggcgtccagaatgccccgcagcatcgtttttttcctcttcgtttctccggatacaggcatgtccgtcacggaacggttgtccacaatgggatatttggagagaagggccaatccccggtcttctccgttccgcatgaccaggaccttatgcggtaactgaactccttttcttttcagccgcatttgcaggtcgcgcacggcggcttccccacccatttctgacaatcctactatttctgcaccggattgccggatgagttcggccacggcctcccgtgcttcaacgggcttgtattttacctgaaagttgctcctgcgcggatcttccggtacaaaatagttgccagcatttattgtgaataacctgacaggttctcccttttccggtatagagattttctccagaacccttcccttcccgggcgcctcccgggaggcagggaccgcctgcggcgtatccgtcagcggcttccattccgtcaagccataccccagcaccgcgcacagcacaaccagggccgcgatgacggaggttcccctgcgttttgacgttttcctcatcatgtccgttcccttgaaagattttctccatgaaggacgtagtgaatgaacaggccgagccgcacaaaattttccggcttattactcggctttcacttcactttcatccgtagttcatgataaaccatgaatgtgccttcattgcaaccccagaacgagtcccagcctgacgagcagacactttcccaatatgccgaacataccaggaaaagcctgattgcgcgcctggagaattgggaggaccagcgcacgtgggatgagttttaccggacgtactggcgtcttatttattccgtggccctcaaggccggattgagggaggacgaagcctgggacgtggtgcaggaaaccattctttccatcgccaagcagagcaagaagaatatttacaagccagaacagggttccttcaagctctggctctggaatatgacccgctggcgcattaacgaccagttccgcaagcggaagaaggatacggccatgctgatgagcccggacgccacggagagccaggaacatcccatcgacaagattccggacgaagggaagaataattttgaccaggtgtgggagagggagtggcagaataacctgctccaggctgccctggaacgcgtcaaagcgaaggtgtctcccaagcagtttcaaatttttgattattacgtgttgcgggagtgggatgcggcgaaggtccgcagacagctcggcgtcacgattgcccaggtttatctggcgaagcaccgcgtaggaagcgccttgaagaaagagctgcaattccttcattcccaggaagaggagaaggagagataggcggatgccgccccggtgcaaccgggcccgtttcccgcttttctcctgccgttccgcttttcaggaatgattcctttattttgcctcttgccaaggcagatgttttgtcgttagataacggcaactgcaatgccgccctcacgcaacagacattccgcccagagagtttttacctgggacaagatcaagatggccctggcggcggcggaagaagggttttatatctggaatatcaaaacgggcgtcatccattacacggaccgctgcctgaccatgatgggggccagccgcaaggagaaggcccccaatattttcacccagccggagcttaccatccacgaggaggaccaagcctttttttcccaggaggtgcgccgttacctggacggccattcccacatgcccatgcgcattgaaatacgcatgaagaagctgaattccaagagctggagctgggtccgcatcaacggtctcgctcgcagggacaagcagcgccgccccgtcatgctggtaggggtatgggtcaacattacccggcggaagacggcggaactgcgcgccgcggaagacagggacctgttccacaccctgattgagcacattccggacagcatttatttcaagaaccgggaatcgcgcttcgtgctggcgaataccgccacggccaataagctgggcgtgcccacgccggctgacctgaccggaaggacggacgattactttttcgatcaaacgatgtccgatgtttcccgcaaggaggagctggacatcatggctaccggacgccccatccgcgcccgcctccatcatgagacatggcttcacaaggatgattcctggagccagatcagcaagtttccttggtacggccgcaacggggacctgaagggcatcgtgggcatttccagcgacgttaccaagctggtgaagacggagatcaaggccacggaaacagcccgtattctggaagagcgcaacaagtccctggagaaggagatagatttggcccgggaaatccagttcgccctgcttccctatgagattccctcccgctcccatacggaacacggcctgacgcgccatgtggatttccaccacattttcactccttcagagggggtggcgggcgattggttcgatgcctttcccgtggggaattccggcgtaggcgccatcgtctgcgacgtgatgggccacggcatccgcgccgccctaatcgcttccatgctccgcggcctgatggagcagttgtcccatctggcggacaatccggcggcctttctgtcttccctcaaccaccagcttgccaaaattctgcaacgggcgaataccacgatgttcgcctccgccgtttatatttacctggatttggaaaccggcgtcatgaccgcctccacggccgggcacccgcatcccattatcctggggccggacggagttgcgcgcaagatgccgctgcccaggggcattgccctggggctgctggatgacgccacataccagaacgcccagttccccctcctggcaggttcccgcgtcctgatgtatacggacggactgacggaagccgccaattcggaaggggaagagctgggcgtggagaggctgatcgattatttcaacaattcatcccccaagagcaccaaggattttgtccatcaggcccttacctgcgtagcaaagttcaccggctgcaccaaccaggccgacgatatctgcatgctgggcatcagttattccgaacacgaggcaaagccggggcattaacaaacccggttgctccattttccggatatttacctccttcctccttttttgctggggaaaactccacattccgtccgcctgaaaaacaggaatcattcaagcaggaaggccctttcccggaaggacggtctgccaagttttcctttttccctgaagagtcctgccggcagggaggcacattctccctgcaaggccgcagatgattcccgccaggagaaaaacggcagaagcggctttcaattttcccgcaggaccggaatacgcctgctctcttttcagtaaaacaggttcaagaacttcctttccagcctctcccaagccgcattccggaattcccgccgccaggaacttcccgaatcgcatcttcctgaccaatccttaaaagccagcggaatacgggacggcagttttcccatgccgccaaatgacaaggatccgtcaggttgcctcaggacaatcatccggagagaatttgaagttgcgccagaacggaacgctcagcatccagatggagaacaaggcttccagccctcccgccatgatgatcgtcgcctggactccccaaacatccactacggctccccagcccatggccgccaaaggctgcaccccaatcgtaacgatgctgaacagccccagaatggcagatttgcgttccggcggcgccagaagctgcacggcggatgaagaggtgacaaagagggaagaagtagccagaccggcaaagaagaagcagagggcctgtatttccaccacgggaatgatgccggccacgcataatgcgctccccatccacagcgtgcccgaggagagcttggcccccaccctgtcgcttttgcgcgcaaacggcaggacaaagaggatgctcaccatggcaccggctccgaccgctcccagaatgaggccggtattcctggggttcccgtgcatcaatgccggaacaatctggtaaagggattgcccgcagatgttctgaatgagcgcgctgatcatgatgaagagcaggctgcgcgtagaaagcaccgccttgagcccggaggcctttcttccggccccgcgctgctttttaggggcggaggtatccgcaacgcgccctttcagagccaccaggcagcctatcaacggcaggcttgccacgacattgccgccaaaggcggttccggccccccactccgcaatgatgtagccggccagcgccggacctacggcgcggcacgtgttgaataccagggagtacatgcccacggcctcctgcaactgcctgcgcgggatcagatcgcccacaaaagcctgctgcgtgggaaagcccaccgtctggttgacgcccatgaccagcccggcggcatacaagtgccatagctggagcatgtccagcatcgtcagcagaaacagggctacggccaccagccattggacgcattgcacggctatgagcagttttctcctgtcaaaacggtctcccagcccggccagcagcatgccgcccagaaagaaagggagcgcgttcagggcggccaggaagcccaccgccgtggcggagccgccggaaatgtcgtacacaagaatgcccatggccgtcacctgcagccacatcccgatcagggcggcggcctgcccggaccagaagatttgcaggttcctcacctgaaggggcttgaaaaagcccagccagtcattcagccatttcatcagctccgccatcctagcccccgccgccggaaccgtccagacgcgagtgcggcaacggaagccctcataatcccggaacctttttattcctccgcggtatagcaggccgggtagtccttggaaggcagccagacgggaaggtctttcatcctgtccgcggcgcgttcggaaaccggcatgcgccagattttaaagaaaggccccatgttttttcccgtgaccttggagaaggcgttcatgacccattcccatttcttttcatcactcagcttgccgttgtcgtacggcttgtcatggaattgaagggccacctgccggaaagcgtcaaatcccagatagtacatgagctccacccagaagaagagctgcaccttgttgggcgcttcattgtaggtctggtcgccggagaagtattttttcatctcagcgctcatgccgtacggccccatgccgccgccccagcaggattcaaagtttttcccggtgcccattacctcgcaaaccatggagaagatgttgacggatacttccgtctggccctccatcgtaaacggaggcgactggtggttatgccccagttcatgccacagcccccagcttccggaatggatgatggagccgctggcaatggagtccgtccagtccttcgtagccatggcgggataaccggaatgcccggccccggcggaaatctgcctgtccacgacaaaacgcatcgggtgatgcaggcggtccggcttggtgtcccatcccatgatccagtcctggagggccatgtttttttgcaggaattcagccgttttctgaacatccgggcaccgcttcaactgctccacgggcatcgtgacaatgaggcggggcatgcagatttccccccacggcgccttggcattttccagttgttcggcccattgttccggagtggtcttccccatgacgaacagaggggccggcacggctccggaaatctgaaccttgaatacttttccccgtttggaacgctggcccacattcacgtaaaccaggccgcccatcgggttcaccattttcacgcggccccggtccgccggaacctgcatggttatttccggaacccttttccattcatccagcttgtgcaggctgtccgtatggcaccctatgcgcacgctgaccgtgctgtccttgggcgcgccggacagggaaaaggagatttcccctccggggggagcatacagtcccgtactgtgccagccgccgatgttggaatctatttccaccgtccttcttaccgtctgggccccgtcctccggaacgccgggaaaatccttcgccgccgggcacgccttcagggtggaaagcttggcgtccttccattcccggcatttttccagaagctcctgcatgcgccgggtgtcattacctcttttccacggagcggctcccgcagggaattcctccattcccgccattttttccgccttgtcccaggaccatgtttccagcggcttgtccttatccgtttgaatttcatccctggaggggattgagtagacggaaagctccggcatccggttcttcacaggctggggaaaacgcccttccggttcaggctcatcttcttccacagggatgttttcctcctgcctgcgggcctgttcctcacgttcgcgccgttccagctcctccctcctcttcttttccttctcttcgcgttgagcctgctcccggagcttttgagccgcttccgcagcctgccgttccttcttttccctggcttcctcacgcgccttctgctctgcctgcctctccttttccttcttctccctgatttcccgctcacgctgcattctctgtttttcagcggcttccctggccttcttttccttcattttacgctcggcagtcaattcctgggcagctttcctttttgccaggttatcctggtacagataatatccggctcccgcgccgcaaaccagcagaagcactaaaaaccagcctacggcggaacctctggagacgcttcgggtaaaagaaggaatattcatgtgatcggaattcggaataaatcgtcattatttctgcatcgcagacatttcttgtcaatacgattcttccttttccgcgggagctttcatggaaagaacattccggaaaccgattttccccgcatccggcgtcccccgtttttcaagcgtccgcttccggaacctccgccttcatcccgaaatgggggaacgcgccatgcatcaggccgtccagcacgccgcgggtgcgcggttccgggctgatgtatccatggccgcaggctaccatggctttcacttcctccgccgcattggagggacagcaccggaacgcttccggcaaatggcgcatggcgtccaggtcgttgtgcccgtctccgaagatggccgcatggacgggaggcacaccgaaccgtgaggctacaaaagccagggaagtccccttgttgtagtcacggtggctgaaacgcaggtagggcccagccctctgcgtgacgatttcatcatacggtccaaccgtgtcctgaatgacgcaggagacgtcatccagcccgcaggcatcgttcaccaccagggaaaaagcgtcattggcctgcctgcggagttccagctcggagaaccggtgttccagatggtccatcaatgattccagcattccgccgtaacgggtgaacaggtcgtcatgggccacggagcaggcatcgttccacggaacgccgggcatcagccgcccttccgcatccgccagatgaacgttccgttccatcgtgaccgtaaaatccggggcaaacgcttccggattaccctggaacatgtccatcagcccttcccgcaggtaaacggggtccctccccgtattgatgccccagagcacgccgtaccgcacccggagtccacgcatggttctgaaaaaaacgcgtctttcctccgcagggccgcccaacgtgaacagggtatcgtcaaagtcaaaggagaagagataccggggcagtccgggcctgggcaaggcacggaccggcagaaaacgcatcagttccatttcaggccagtcctcccttcaccgcggcgcgcctctccgcatgcacgacgggttccgccagcggaatatcctcctccaccggctccgccgagggaatgtgttcttccacgggttcggcggaaggaatggtttccggaacgggttccgcctcagggatgacttcctgccgcggcgcaggcttctcccggcgtcccggcgcagcgggagcgggacgggctgccgggacggcagacggcggacgcgccgcaggggccgttttcctttctcctgcggaagcggggattctggcctcggcgcccacgccggcccgcacctggcgggcaatgggggtattcatatccaccgcatacgtgacgggcaggcttccggcgggaatttcctctcccggcttgcgcatgtggatttccaccctgcggttggcagcctgggcattccggtcccccttcgtggagactaccgggcgggaggccccgcaggcgcgtatgtagagcctgcattccccgttcgggcgcgtcagggcaatgccgttgtccttcagccactggcgcacggcattggcccgcatcagggagagcacggcattatattctccggaaccgaagctgtccgtatgcccctctacaatgaaaatcgtgtccgggtttttcatcatcagcccggcgagctgaagcatgctgaggcgcgcggaatttttcatcaccgccttgttgtattcaaacagaaggtccgcgcccagcctgctgtaaccgctgtccttgcccagggaggactgggccatcaactgggaaagtgatttactgccgtccggcagatgggaatcatcctggccgccagcccccttgagcttgttgttgtaccattcgtccgggttgaccatgtccggctccgccgtcttgatagtcgccgggctggcggaagttttcagcatctcgggcggagaaggttcaggcagtcccttcgcgacggcattcatgtccacctgcggcattttgggggcgagggattccggcggggacggagtaaccggatcggcggaaaagctggtttcccccggagcgatcaccacctgttccggcagcatgtcctccaggtccggcaattccggcggcacttcctcaagctgctcgatatccggtttttcaaccacttccgccacatccggtgcgggacggtcgtccgctttcagcacgattttctcaggcagcggcttccggtcctcctgaaccgcgggtgccttatgcacatgaatgcccaggtcaaaccagctcagaacgatgaagcccaggtagtgcaccagcacggcggcaagaagggcccccaccgccacggcggcaagatggcgcggcgcaggcaggatgaaacggctgcgcctgcggcggttctcgcggagttcacgggtgttttcctgattggcactcacgggatcatcagcaaaaggagaggcacggttcatgaaccggaaggagcggtgcccgtagcaggtgcactgtaggtttcatgggacaacaccctgggcatgggcatgcgcgtattctcatgaatccattccgcaatgccagcctgcaactcgtcatccccggcatagacgttgaccttgtaggttttctcgaatttctcccccttttttccttcaatggaatggaggaaggtccgctcccgggtgccgtagggctcgccttcccggatggattcataaagttgttttttctcgtttctcagggagtcgtaaatgctcaggcaatcctccagcgtggagaagaagtactggttcgtgcaaaccaccatgacgggataatccagtttcagggcatcgtctacgggagctacgtcaaacgtactgaaatccgcacgccagtcaacgccggcatccagcagccagtacgcggcataacacaggggcttgccccagtcctgctccatttcccggacggccacggttttcagggaaggaaagcagtccatgctgaccatgcagcggatgcggggatcttcagacgcggctttcagcagcaccgctgccccaaacccctgccctacggcggccacgggcggcaatcccccctgtttccgggatacggcgtccagcagagccgttacgtccgcatattccttcaatccgtacgtgcagaatttccgggcgtcgtttttcccgcgcggattccataccaggcacgtgtaaccggctccggtcagtccttccgccagcggcagggagcctttcaccccctggtcccaggaggtggctatcaccaccagctccggcttcgcctccagatgcggcattcttccgcgcagtttcaaggtatcccgcacgcggctctggcgcggggacaaggcctccggacgccccggacgcaccagatagccttcaatggcggtaccgtcggcggagacggcttccaccggctccatcaccagggaatccgcaacgggagaagcggagggttcatccccccccacgggaacgagcaacggagtggacacataccacgcaaaccacaccaggacgcccactgctgccagaaggagcagaagaaacagttgaacaagacgtttgaacatggaaaagctgtacccggaaagcggttgtcaggaagattttatcccatcctgtctacgttgacaacactcaacttctatcaggagaatatcttccgcacgccattccggcccgcatggagccgtgccgcaccgccctccgctggacaggcgcgggcgcacggacatgcggttccggcaagcctccgtccctgcccggcggccaaataacgctttatttcccgcccccgatctggcatccttgtcccaccttactttttcatggcaatccaggcccgacatttccgccaatggttcgcattcctcctcctgcttgcgctgggaggaacggcggcctggttcctgatgccccgggaatggtcccagatgcaatgggaaattcccggcacgccgtccgaatatccccttgcccagcttctgcggccctggctcattctcctgggctgtttccttccggcgctggggatgctgctgtacaaccgctcgggcatcctggacaggtatgtggcgcgtacctggttcacggctttcatcatgtgcacggccatcctcacgctgatttacatcatcggcgactttgcggacaatgtgggggacctgatgaacctggattcccccctggcgggcaccttccgcttctacctgagccagctgcccatgattctgaacctgatccttccctacacccttctgctgggaacgctctgggcgcttaccaagctttcctcatcctcggaaatcaccggcatgctgcaatccgggagatccctgctccggatcaacgccccggtcatcatcggtgccgtctttgcggccatctacttcggcatcttcgggtttcactgggctcccaattccactctgtacaggaaattgatgttttcctccctgagccagaataaaaatgacgacgcctcccggagcaccatctacaagaacgacgcggaatcccgcatctggtacctcggcgaccctcccggaatagactcccccggcgagccgttcaggcaggtgcgcgtggaacagttcagcgcgcccggaaagatggagtacgagctgtttgcggatgaagccatgtgggacccggcttccagaacatggacattccggcaagccatcaaaaggaattattcccaggaggaaccccgccagctgaacgacgtgcccgtgttcgccgggcaggaataccaaacgttgaaagagcattatccagagactccctggcagttgatttcccccaacgtccgcgtggatacccagggcactccggccctccaggaaatcatcaggtccggcacgacaaacgccaagtacctcagaagcctgcaaacggaatggcacgtcaggatagcccgcatgttttcctgcattatcctgacattcatcgccattccttccgccatcacgttccagcggcgctccgccatgtccggcatcggcattgcgctgttcctggcggcggccatgctgttcctgtatgagtttttccccacgctggcctccgcaggctacctccccacctggctgggggcgtggatgcccaacatcatttacaccatcatcgccatccgcctgttccagaccaagctggcccacagaagcttcatggagatgctgagaggcttgaaaaagacacccgtccatgaccaaccctgaccaccttgacgactccctggcagccgtccggaaagcccgcgaactgctccaccgggcacgcgccgtgatttttgactttgacgggctgctggtggatacggaatacgccatttattcctcctgggaacgcgtgttcgcatcctgcggccacgccctccccctggatttgttcaaccagtgcctggggagcggctacacccactggaaccccggggagcatctggaacaactgacgggccgcaccttcgactgggaagccgtcaacggccgccgccaggaggaaatcgtccgcgacctggagcacgccggccttctgccaggagcctgcgaactcatccggagcctggcggaagccggaacgcccatgggcgtcgcctccagctcttcccaccgctgggtggacggctggctgaacaggctggacatcatgccctatttccagaccgtcgtctgccgtgacgacggccttcccgtcaaaccggacccggccctgttcctgaaggctgcggaaaacctgggcatgcagccggctgaatgcctggtgctggaagattcccagaacggcaccaccgccgcgcaccgcgcaggaatgcccgtcatctccatcccgaaccgggtgacggagcaggcggatttttccctggcaaccagtaaaatccgttccctggcggaacttctttaggaattcgggaattccgccttccattccgttacgcttgtttcttgacggaattcctttcatgccttatgtaaggagaatggcttcccaacgtaccccattatatcactaccgcgtcaaagacaagattgtgggccctatctgcctgacagacctccacgccctgcttgtctccaagaagattcttccggacaccatgatccgggaggaacattcccagtgctggatgccgctcgcaacggagctgcgccgccaggagcgcctggcgcgcctcagggcatccgccttcatgctttcctgccgccctcctaaaagctgcctcctgttttacatcattgcccttctccttctggcctgcggcgtggcgcattccatcatgctccacaccatcctttacatggaagtgctgttcgtgcctgccatagcgtttttcatgggaaagatgctgatgtacatgcaccttcttaccggaggcatgaggaaaatgcccgcccaggaaccggaacgctgaccagacgcaaacgtcttcctcctccccgctctctcccctgcagcctatgagcccgatacccgccagagcaacgctctaccattaccgcaccgatgagaaaaccgccggtcccgtcagcaaggaagtgatcgacacgctggcggcagccggcaagcttccgttttccaccaccatggtcaggaaagaagattcccggaactgggtccccctttccgccattctgcagaggcggattaaattcaaggcgctccagccttcaaagaaggagcagccttccatccgcatcctgttttacgcagcggcaaccctctttttctgctttggcatcgtgatatttttcctgacgaaccatgccgaactggaagtaatcatcctgattccctgcatcctcgttttcatgggcaagcttttatgctacgtccacacgcttgtggaaaagtgcggcattaccgctgctcccggcagggaataagagcgcggcggaacgtccgccaccgtgttgcacccgggccgggacgccgtgccgtcggataacttgaaataaagaaccgccgggaccgttgaagatccggcggtttgaaaattactgttacggagaattatttatttaattccgcaacggcggcttccaggctgggcacgtcttcgatggagatgacggtggcatccttgcagatgcggcccatcatgccggccagcgtcttgcccggtcccagttcaatgaaaaggcggtggccctggtccaccagcttctgcatggaggccgtccagcgcacggagccgcacacctggtgctccagcacattgcggatgtcgtccggcccttccaccacgcgggcttcatagttgcagtagacgggcatggaaggcgtgccgaaggagacattcttgagttcctccgccagcttcaccatggcgctgtgcatcaggcgggaatggtaggctcccgccacattgagcttcttggcgatcttgcagccggcagccttggctccggcaatggccttgtccacgccttcttccgtgccggaaacgaccgtctggccggggcagttgaagttggcaacgtccacgtcgcattcctgcgccagcttgatgacgttttcatccgtcccgccgatcatcgcggccatggtgcccttcgtggcgttgcaggcttcctccatgaacgcgccgcgcttctggaccaggcgaaggccttcttcaaaggtataggttccggcagccgcatgagccgtgaattcacccagggaaaggccggcggcagccacgggattcagggaaggcgccagctccttcaagacggccaggcaggccaggccatgcacgtagagagcgggctggcaattgcaggtgcgggtcagttcttcgccggggccttcaaacatgatggaggagagggattccccaagcgccttgtccgcctgctcaatcagggccctggctgcgggatactggtcatacaaatctttgcccatgcctactttttgggcaccttgtccggaaaacaataatactgcgtccatagttgaggctgaattataccgttccggcaggaaagaagcaagagcgatcttgccaccgcacttcctccgtaatctctttaccgccaatatgaatagaaaatccgccccggtctctgcgagaggccggggcagatggttaagcctgatgtgtcagggaacggccttaggcggttgcttccgtggttgcgggagcttcttccttttcagccgtttcgcggggcagatcgatgatttcgatcatggccacgagggcggagtccgtcagacgctggcccagcttgacgatgcgggtatagccgcccttgcgttccgcgcagaggggagcgatttcatcaaacaggcgcttgacggcaaccgtgttgtgaatggtggcggtagccaggcggcgggaatgcacgtcgccgcgcttggcgagcgtgatcagcttttccacatagggacggagagccttggccttggccagggtggtggtgatgcgtccgttgaggatgaggctgcatgcctggttggcgagcaaagccctgcggtgagaagcgttgcgctgaagcttggaggtttttacaccgtgtctcatgatgatatttttctatgtgtgttggttttgtgagatttagtcgtcgtcgtcttcgatgttggcggcaatcaggtctgccaggcccacggggctttcctcttccagacccaggcgcggcttggcctgcggcacgggaccggtaagcagggagggatccacctgaacacccagggaaaggcccagttccagcagcttgtccttgatttcgttgagggacttcttgccgaagttgcggtacttgagcatttcgctttcgctcttcatggcgagctggccgacggtggtgatgttggcgttgttgaggcagttggcggcgcgcacggaaagctcgatttcgttgacgctcatgttgagcagcttgcgcaggcgggccgtttcctcgtcctggacggcggaaggagcttcttcaaagttgacctgcttgtcgtcatagttaacgaagacgtccaggtggtggcgcagaatggcggaggcctggagcatggcgtctgcgggggagatgcgcccgtccgtccatacttcaaggatcagcttgtcgtagtcggtcatctggcccacacgggtattctgcacggagtacttcacgcgggtgaccggggagaaaatggagtcgatcgggatcacgccaatgggcatgtccggcaccttgttttcgtcgccggtggcaaagccgcggcccacgcgcacctggaattcgcattcgaacatggtgtcctggtccagggtgcagatgatttgatcgggattgaccacctggtaggtggtgtcgtcagtgatgtcggcggcggtcacgacgccctgcttgtgcacgcgcagggagagcaggcgcggttccttgccgttgtgcttgaacttgacctttttcaggttcagcacgatttccgtcacgtcttccaccacgccgggcagggaggagaattcatgctgtgcgccggcgatgcggacggaggtgatggcggcgccttcaagtgaacccagaagaacgcggcgcagggagttgccaagcgtatggccgtaaccgttttcaaacggttccgccacgaaggtcagatgattcgcatcattcgggtcttcaattttttccagacggctgggaacttcaaagcgggccagcgtggtaacggcggtttcttctgcagtagtggtttcgttttccgacataatcgtatgtaatgtaccgggtttcccctcagcacgggcatggcgggcaatccgcctgaaggacctacggcatgttttggaaacgcccgtgcggggagcaatttaacgatctgttttcaacaatcaactcttttcatgtccgccggcaaattttctgtgacttaacgtgcgtcatctggcatagtggggcaaacctatataccaactcatgaagcatcctgattttttggacaacagggattttacgggggaagacaagaagcgcccctccaccatgtccatggacaccagctaccaggctctggaaggagtcgtcaaaaaactttccgaaatagcctccaccaggcacgatccccgttacctccaggagtatatcaagacgggcatcaacatggcgcagtccgaagcctccgaccacgattttaccgtcctgatccgttccgggcgggagatgtaccgggccaactgcgttttcgccccgtaccgccacatccgcaagatttccgtgttcggctccgcgcgcatcaggaatgatgagccggcgtatgaaacggcgcgggagttcgccagggaagccagcgaacacggttacatggtcattacgggtggcggaccgggcatcatgcaggcggccaatgaaggagccggcgagcaacgctccttcggcctgaacatcaccctgccgtatgagcagacttccaaccacgtggtagcccacagcgacaagctgatcaatttctattatttctttgtcagaaagctgaatttcgtagcggaaagcgatgccatggtggcgttccccggcggcttcggcaccatggacgaggtgtttgaaaccctcaccctgatccagacggggaaggccaccatttacccgatcgtccttctcgattcccccggcaagactttctggctgaactggctggccttcatccgcgtggaactggtggattccggcctgatttccgcggatgacctgcacctcatccacgtcaccaagaatccggcggaggccatggagcacatcgaccgcttctaccgcattttccactcctaccgttttgtcagggacgccatcgtcatccgcctgaacacgcacctgcccgcccagtgggtggagcacctggaacgggatttttcagacctgatcctgcccgggggaagaatggtccagagcggaccgctcccggatgaggcggacgaaccccacctggaccggctgccacgcctcattttccccatcaaacgcggcaattacggcaggctgaggctgctgattgaccgcatcaaccagacgcccagccggacttattccccaccctcccatgtctgacggccttcccgcgtggctgattccgctgattttcggcctgatgggagcctgcatcggctccttcctgaacgtggtcatttaccggacgccgctgggcatctccgtcaatgatccggcgcgctccttctgcccggaatgcgaggaacccattccgtggtacctgaatattccggtgctaagctggctggcgctccggggaaaatccgcctgctgcggaacgcgcatcagcttccgctattgcttcgtggagctgcttacggccctgcttttcgccgccctggggtggaagtacgcggacgcctccgcgggagccgccatactgctctgcctgtggactgccatggccatcgtcatcatgttcattgacgcggagcatctgatcgtattccgcacccaggcgctcatcggcgccgcagccggagtgggagcctgtgccctttacccgtttctcctgccggacaatgacgtcatgacctggacggacgccttcacggcctccgtgctggggggaatcgccgggtatgccgccatcaggctggtgattgaactgggcaagctcctgttcggcacctggaagcagcactttgacgctcccgctccgtggagcctgaaggagccggaatccgaccgggacgagctccagctcattatcaacggacagcctcacgactggtccatgcttttccaccgggccacggacaaggccgtcatttccgggggctccgtcaccattgacggggaaacgctccctccctgctccgtcatcctgcgccaggataggatagagctggagaacggagacgttttcccgctggaagacctggaaagcgtggaaggaaccatgatggatattcgcgcgcagcgggaagccatgggctccggtgatgcctggattctgatgatggccggatgcgtgggcggatggcagggcgcggtgttctgccttttcctcggctccctgctggggattgtgcaggcagtcgtttcacgcatggggttcggcaggaatcttcccttcggccccgctctgctcagcgccgccctgatctggctgctgggtggcgaccagtggtggctggcctatctccgcttcatttccggagaataatttttccctccatgacacggctggaccgcaacccttccgggctgcggtctttttttacagatttatttcatattcaacagctttaccattctgcaccccggcagaaaaaaggaagccccgcaaaggctccgtccgcccctttccggagcacgcacgtttttattttgcaaccaggacgaattccgggggttcatcctagcaaagggaggcgtttccacctgtttgagatatcacagcgcgacgcccctttccgaaacgcatcaaacctcaccactcaaagttatgaccaagcaaatgattatcgccgcggcctttgccgcatgctccgcgttcgctcaggacgcgccgccgccccccgccccggacgcaccttccgacgctccggaaatgcagccccctcctgaaagaaggggaggcccccgccaccgcgccggaggcagggaccgccagggcccaggtccggaacgggccaacctccaaatgaggagaattgatcccggcatcatgatcatcggggaagaactggtcatggccaagtatgacaccgacaaggacggcaagctttccgacgaggaaatagccgttctccaggcggacgtcaagaaagcccaggaagccaggaaggccgccatcctgaagaagttcgacaaggacggcgacggcaagctttccaaggaggaaagaaaggccatgcaggaagaatggctcaaggaccatccggaagccgccaagcgcatggaagaaatgaaggcccgccaggaagcccgcaaggccgaaatgcttaagaagtatgacaaggacggcgacggcaagctttccgacgaggaaaagaaagccatgcgggaggactgggccaaggaccatccggaagccgccaagcgcatggaggaaatgaaagcccgccaggaagcccacgctgccaacatgatcaagaagtttgacaaggacggcgacggcaagctttccccggaagaattgcaggctatccctccccatcacggccagcccggcccgcatcatgccgcgcccggcggtcccaagggaccgggtgcgcccaagatggatggcccgcgccgtcccggaggccccagggctgaaggaccccgcgcgcccaggggaccggaaggtcgcagaggcggtgaaggacgccgcggagacggtgaccgcggtccccgcggcaaccgcccggacggcccccgcccccagcttgatcccaaccgcgcccccatcatggcggccggctggatcctgattgaggaaaagtatgacgccgacaaggacggcaagctgaatgaagctgaaatggcacagctcaacgctgacgcctccaaggctctggaagcgcgccgttccgctcgcagggaagccaggaaggcagcccgcggcaataacgatatgcccctccctcccgctccggtccaggaagaaggggatgatgaataagttcacccgcagaaacgcatagcagaaacagagagacggccccgtctgccttacggcaggcggggtttttcttatcagggaaaagggaaaaggaattaggggttataggaatcatagggaactttagggattatagggaattcccatcatcacccctcttacccctcttacccctcttacccctcttacccctcttacccctcttacccctcttacccctcttacccctcttacccctcttacccctcttacccctcttacccctcttacctagcaaactctctcggacttacttaacccttccccttccttccaccaagaaacagaccgggggaggcatgcggcctcccccggtcagagttaacgaatcaatttcctgccgcgcctcaggctccggccttcatggcctgcttgacttcctcatgcagaccgtgcttccgggagaagaggagggccgccggagaggcgatgaagatggaggagtacgtgccgatcagaatacctgcggaaatcgtccaggcgaagtcctccatggaagggccgccgaagaagtacaggcacaccagaacggccagcgtggaaagagaggtcagaatggtgcgggaaagcgtctggttgatggcttcattcatgatctgggacgcgctttcattcgggtccgagaagcggaggaattcgcgaatgcggtcaaacacgatgattttgtcattgatggaatagccggccaccgtcagcagcgcgccgatgtggatgacgttcagctcagtgccgctgatgatcaccagccccagcaccagcaggacgtcatgcgtcagggcgatgaccgcgccgatggcgaaggtccattcaaaccgcaccgtcaggtaaaccatgatgcccagaatgccgaagaagagtgcccaggcggaagtgatgagcgtatcgtatcccatggactgcccgatggtttcctcgctgaatggtgcgttgtccagcacggggaacgccttgtccagggccgtggtgatggccgccttgtccagggcgttgtcagagaagttgatcaggatgttgactttgctgctgtccgtggattccgccacttcctgcacagtggctttctgggtcagggccagcttgttaaccacgccttccacttcccggaaggagatgtctcccttgttgaccaggtaggagatggaggaaccgcccgtaaagtccatgcccaggcagtccttgcccttcatggcccccaccacgatgcagataagcagcagaatggcggacagggagcaggaccagaccttctggcccatgaagttgatgttgctcttcttcttgaagagattcaggaatttaaggtccttcatcatgccgatggtatccgcccagtagaacaggacgcgggtgacgagaatcgccccgatcatggaggtgatgacgcccaccgtcagcgtaacggcaaagcccttgatggtgccggtggccatccagtacaggatgacggcggtaatgagggaggtgatgttggagtcaaagatggcggagaaagccttgtcaaaggagttgcggatagccacgcggaaggggcgccccatttccttttcttccctcaggcgttcgtaaatcagcacgttcgcgtccaccgccacgcccagggtcagcacgataccggcaatacccggcagcgtcagctcaaacccgaagatggacatggcccccagaagaagcagggcattgatcgtcaggcccatgatagccaccagaccggcaaagcggtagtagatgatcatcatgatgaagcagagaatcagccccgtgatgcccgcgtattccccctgaaggagggccgtatggcccagggaggcggagatttcgctggcggattcaaagttgagcttgttggtgagggggttggaaagcaccttcgtcagggcctccgcctcgccgggcgcatccagtccgctgatttcaaagctttttgaaagaatggcctgaaccgtaggcgcgctcttgaccacgtcatccagaacaatggccatgcggtcgtggcccagctgcatgcgggaagtcaggttgtacatcttgtccgccccctcgttgctcagggtgacgttgacatggccgggacgggccaggtccaccccggcgcgcacgatgtccttgcccgtcagggattcacgtttttccaggaagattttttccgtgacgtcctcgtttttgccgttcttgaaggtgtattcatacatcctgtagccgggaacgcggatgcggccttccgccaccagttcattgttgcgcggatggacggggagaatctgcagcttggccaccttggtcaggatggccttggtttcctcgcgcttggcagggtccgcggcgggaatctgcacttcaatgaggttcaggttgtcctttttcttcgggcggatgatgacgtcattggctccggtgctgttgagccgttccgtcaggatcacgcacgcctgctccatggcctggtccgtcagcggaatgggcttgccgtcatccccgatgttcggttctacgctcagcgtgaaggagacgcccccggcaatgtcaatgccgtatttcaagccctgctggaaaagggagaacagggaaaaggacgcaatgccgatgatgaagatcgtgccggcgttgcgcttgaccttgtcctggtcggaacccaggtaccagaaaaacacacccagcaataccagaccgccaatgaaaatgaagagagggttgttgaagagatcgtaaataaacgcgagaggagcggacattccgccagccgcggggagagtatcggcagatgccaggagattcatagacatttcaatccggattgggtgtgagtaatacggcaagggattgtggagaaattcgccagcaggtcaagccttctgtgcgtgtacccgttaagaggaagccaccccctgcggacctccggaaaacgagctccgccgcgggcatgaaaaacccggtttccctgcggaaaccgggttgaaagaagaatggaaaaggggaaacgccggagattacatgcctgccaccgtttcaacgggaacgggggcgggcgccacgggagtgacgatcacgggcgcggaaaggggggaggaatccggaacggcgggagaagcgggcatggaaggagcatggccggcggcggcgcgtccgcgccggatgagctcggaaacggtcaccagctcataaccgcggtttttcagccctttcacaatggcgtctacagccgccaccgtggaggcgtggatgtcatgcaccaggatgatggagccgggcttggcgccgtttacggcgcgggcggccaccacggaggagccgggcttgcgccagtcattcgtgtccacgtcccacatgatggtggtgaagccgaagcgctggcgggcccaggaagctacgccggcgttcgtgtagcctccgggggggcgcatgaccacgggaacaatgccgcaggcgttgcggatggcttcattggtgctctggagctgggattccgccttttcgcgggataccttgctcaggtaggcgtggttccacgtatggttgcccacttcatggccttcactgaccatgcggcgcactacctggggatgggctttcacgttgcagccctgcatgaagaaggttcccttgacattgttgtcccgcaggatgtccagcaccctgggggtcagcgtcccgtggggaccgtcgtcaaaggtgagggccaccactttgtccggcacggccacgcggctgaccgtcactcccggaatgcggggggaaagcggggtgttgttgtaggacgggctcacggacggcacctgcacggacttggggggcagcttcacggcggggcggtccggcttcttccccggagcggtcacgggagaaagggaggtcttcaccggagcgccggactccaccggctgctcctgatgctgggaacaggcggacagcccgagcgccagggcacatgcaaggaataaacgtttcttcataacaggtttttggaggatgtacgcccatccctccttcttgtcacgtcctaaatcatccatccgtgcggcatgaaaaagaaggaggcttcccctccctgggaagggcgcccgcgggaacgaggcgggggattattccggactgtccatgtcgatatagctgacggataccgttctgcggggattggaggggtcccgaacctccaccttcatccgtttgaaaaaccaggagccgtccttcagcttcatcacggaatcaatcatgaaccttttagccagttccccgcggccgtcaatgccgtccacctgccacatggctccgttttccttgtcaatccagacgcgcacccaggcatactgcccgaccttgggattcgggttcggaatctggacaatccagcagtcccggcccttcaccgtgctcgccgcgtcgtcccggacgattttggcctggggccagtacaggtagcgcatggagaggtcctcatacgtcacgtccgtcccagcgatgggcaccgcgtactgggcgaccggcagaacgcctgctttcccgtccttccaggaaaggatttcctggccgcggtccttgaatttcaggtcaaacctgttccagacgttattcaactggtactggaaggcaatgaggttgccgcgcaagctcatggaaaagggaactttcacgctgcgtttgcgtatttgccccttgatgtccttgttctcctggagggtcgccccctggcgaacccttttcagcagttgcccggcatccgggacggcctgggaaaatgaaggagccagggaaaggaccatggcggccatccccgcgaaaaaagtggaaagcaaagaatgtctgcgcagcatgaattgctcatatcactccggaaacgcggaaaaaaaccttttctcagtcaccgggcggcgtccgtgacattttgcgctagattttgctcgactaggtaatacaaaacgacaagatgtgcccaacgacatctattgatccatcaattatggaaacgcctgcattcttgaagcccatccagtcctatcctggggaaatcgtccagtttattgaaagaatcccgggggtggacgtaaccggagaccgcgaaaccgtgctggaacagctggaaccgtaccacaaggcggaagtggaggccctgggctggcggtggaaggacctgcgccgcgccgaacaggtacacggcaccagggtggccctggtgggggacatcggctccaattatcccgtggaaggcgtggacagcctgatctgctccggagtttccgactgcgtgcttgccatttacgtggcggactgcgccgccgtctggctgtacgacaaggaaaactgccaccgctccctgattcactcaggcaaggctggaaccgccggcaacatcgtttccaacaccatcaagtccatgaagaaatgcctgggggtggaccctgccaacctgattgccgtcatctccccctgcatccgtcccccccattatgaggaagacatccccacggccatcaaggcccagctcgttgaggaaggggtgccggaagaccagattcacgattcagggctggacacggcggcggataccaagcgcttctactcctaccgcgtggagaaggggcagacgggccgcatgctggccctcttcggcccggaccacgccacccgcccgcacccgatcattctttaacagcggaaaggcagcgcctttcattccttttgcccagcgcatcacggttccgccgtggtgcgttttttttgcaggtggcccatacccgttggcgctggacgggaccggcccgcaatcccgcaagggacatggccgcatcccaccgcggcaggaccgttccggttattccggacccgataatccaagttgccgttcccgcattcaaacatcattacatttgcaatcatggcagtaacaatcagcgacaattatcaggtaaaatacaccaggaaatggggcaccctgctccagcagcacgcctcccgcctggacaaatacgtcagcgtcatgcgcgacttgagcggaaaggtggtctttctggaccaattcggcgttctggacttcacggaaaaaaccacccgcgtgggccagaccgttctgaacgaggcgcccaccacgcgccgttccatgcgtccgcgcaccttcaccaaggccatcggctacgacgaattcgacgctacccgcctgggcgacatggaccttcccgtcagcaagacgattgaaggactccaggccgccgcagggcgccgcatggacgacgtgatgatctccgcctttctggacacgaattacgtgggggaagacggcatgaccgccgttccgttcaaggagagccagcagatcgccgtggaccacgtggacagcgggaccaagggcgcgagcaacctcacggtagccaagctgcgcgcggccctccagctctttgaggaaaacgaggcatggaaccaggatgccccccagttcggcgaccagctcgtcattgcggtgaccagctcccagatcatgagcctgctgcgggaaacggaggtcagcagttatgacttcaacaacgtgaaagccctggtggaaggcaagatagacaccttcatgggcttcaagttcatccgtacccagcggcttccgaaggcggaggacggcacccgttcctgcctggcctgggtgaagagcaaggcgcagttcggcatctggaacgacttcaaggtgaagctttccgtacgcgacgacatggaggaagccctccagatccgcgccaagttcgcctgcggcgccacccgtctccaggaggaaggctttgtcaaaatcctgtgtgacgaaggggccagttaatccccggacacccgtttaaccctgaaccactcccctcttccatgaagggaggcgccccggaccggcctgcggtccggggcttttgtctttccccggtatgcgtacacgctccaaaacgggaatttgactttcccggcataccggatacattgccctgatgaactggaagcgctttcatctggtactctgcatgctcctgctggcggcatgctctacggcacgcggggagaaaacacgcgtcctgattgtggacggcttttccaaccatgactggcagcgcaccaccgcctgcctccggatgctgctggagaacgagggcagctattccgtggacgtgagcaccttcccggcacgcgccacggaggcggaacgggaggcatggcatccggatttcaaaggctacgacgtggtgatccagaataccaatggcggaacgaacggtcccgaatggggcgccggggcgaaaaaggccctggaacagtacctcgcggagggaggcggcatgctggccttccactccgccaataacgcctttccccggtggccggaatacaaccgcatgatcgggctggggtggaggccacgggattacggcacctccctggtcattacggatgatgaagccatcctgcgcctccctcccggcgaagggggccacacgtcccacggggaacgggtggatgcgctggtcacacgcctgggagagcaccccattcatgccgaactgccgcgccgctggagaacggcggacgttgaagtgtaccgttatgtacgcggcccggcggaacacgtccaggtgctttcctatgcccgggacccgctgacgggcctcaattttccggtggaatggacggtccagtacggaaaagggcgcgtatacacctccacgctgggccatgtctggcccggagaccccagcctgaaggggattcaatgcgccgccttccagaccctgctgttccgtgccctggactggctggcgggaaaaccggtccactacgccgttcccggagattttccggaccggaaaaaaccgtccctgcgtcccctcccccatatcctccttcagatggtctccccctgaacgggcacgcgtttacgcatgcctccccatgcctttacacccagagctggcccatgctcccgcgccggtggcgtagcgttgcgcctccatggaaaagctgacattttccgggcgccaaaatggggtaatgtcattaatagaagattgaccttccttccttagctgggatagtaggatgtatgcagcagattgtacgtgaacatcagacctatccgccgaaaatcgttgcgtccgtcacctcatgggagttgtggaaaacgctgaaaggaaaagatttaacagaccagtgcgactgggtggaactgcgcgtggatgcccttcccccggaactcacggcggagcaggtcatggagttcaggccggagatgcccctgctggtcaccgtacgctgccatgaagaaggcggcctgcgccgcattccggaagaggagcgctttgccctgctccgtgcctacatgccgtacgccaccgccatggacattgaaatcaaggccatgcggcatgccagggaactaatcatggaagcgggggcacgggacgtcatcgtcatcggctccacccatgacttccaaatcacgccgggcgtggactacctgcgcgaactggaaaaacgggcgcgcgcccacaaggcggacatcgtcaaattcgcgttcacgccgtgcctcgcctcggacatccagacgggcgtgcagcttttcaccaagcccaaggggccgattgccgtcatgggcatgggacccatggggcccgtctcccgcctgctttactcccagctcggctcctgcctggtgtacggctacctgggggaaaaagagacggcgcccggccagtggcacgtctccctcatcaaggaaaccctccgccacctcggccctattctccgctgattccggagcctttctttccgctctctcatgaacattattacttccgcctttctggcggcacgccccaaaacactcaccgcctccctcattccggtatgggcaggctgcatggtggtgcagaaactgaccggaaactggaacgcggccctggccctcctgacgcttgcctcctgcctctgcctccagattgcctgcaatttcttcaatgacgccattgaccacgccaagcacgccgatacggaacggcgcaccggccccgtgcgcatgacggccagcggagcgctctcccacggaacggtcatgatcatcggcctcgccttcctgctgggcgcgtgcctgctggcgctccccctcattgagctgcgcggctggcccatcatcgccatcggcattccgtccctctacttcacctacggctacacggggggaccatggccgctggcctacaaggggctgggggaaatattcgtcatcctcttcttcggcctggtggccgtcctgggaaccatcctggtgcagataggcacggctccggtcgtccccggcacgctggtggaatccctggcggtgtacaacgccggcatcgtggtgggcattcagtgcggccttctgtgcgccgtcatgatagccgtcaacaacatccgcgacagaaaggaagacctcactacgggcaagcgcacgctggccgtgcggctgggggagggaaaagcgcgcgccatggcccaggctttcatcctggcggcctacatcacgctgcccacgtccagccgggccctgcacctgaacctctcccatacgtggtggatgtggattcccgccatcctcttcggcggctacctgatgctcctgatccgcaaaacgcctgcggacaaacgcatgaacaaggtgctggccctcgcctccctccacctgctgctgtacctggccacgtacacaattctgcccgcacactgaaaaacgcctccttttcccaacgtagtaacatacgtgtatcatgaatctgcttaaattcattcccgtttttctcattctccccaccttcttctcctgcactcaaaaaagcactctggaaatcgccaccgggaaggtgacgaccatcaagctgggcaacgtggtccgcatcaaggaaatcaacgtgctgacctccgcggatgacggcaccttcgccaacatggcgggcacggcggcggaagcgatgacgcccggcatcatcggcatgggcacctccaaactggcttccgccaccggctccatcgtggacggcagggtggaggccaccaaaatgatccgcgtgcgcgtcaagctcaaggacacgaacgaactcgtggaagtccagcaggaagtaacgcccaatttcaccctgaaaataggccaggaagtcgtcatcacccagggcagcacgcccggcaatgtctggcccgattaacggaaatgaaccacgctgcggcacccgccccgccacaccggggcctcctgattaaaagcgccggcctcctggtggccgtctcccccctctgtgcgtggaactactggaacagcattccttccgcagcgctgctggcccccctgctccttgcggccctgttcgccggaacggcatgggccatgaaaaaaaacgtccgtgaaaccttccgcccggttcttccggcggtgcgtctcacgctggccgctggactggccttcacgcttatcacccagctttcccaggctgccctcaactggcttccccaggtactggcgggaacggcaatcatgccgcccgcatggattatcccgctgggtcacctgaatctgctggtgaccttctgtgcccttcttctgctaaccatggcggcggcctgtgcatgccttctctgcatcggaaaacgcggaagccgccccaccgcggaaaaaacgcaaccggactcccgaacccggccttcctgacggaagccgccgaagacgccaagaagatactccggaaatacggggatgaacatcccctaactctcccgcatcaggcggaacacgtcttccggacgcatccccgcggcacgcatctcctgaaggctcaggctccggtccctcttggcaagccgcttgccggaggcgtccttcaccagccggtgatggtaccactgcggcactggaagccccagcagggcctggagcgtccggtgaatgccggtcacagggaacaaatcctcaccacggctcacatgggtgacgccctgggccgcatcatccaccaccacggcaatatggtagctggccgcacaatccttgcggcccagaatcacgtcccccagttcctccgggcggcagacctggtctccggaccgcatgtcccgccacagcagggggcccgtaatccgcgccgcggcgcggcagtccagccgccacgaaaagggcttgccggatttgagaagctccttccggcgccccttgtcaagcaggcggcaggttcccggataaacgtccacgcggccgccctgcggcgcgccgcccatggcggccacctcctccgcaatctcccggcgcgtgcagaaacaggggtacagcacgccgcggtccttcaatatctggagggcgtgttcataagcgctgaagcgtgaagactggaccatcatcggcccgtcaaagcggatgcccagccagtccaggtcttccaggatgccccctacaaactccggacggcaccgcgtccggtcgatgtcttccatcctcagcacgcaccttccggaaaaacggtccgccagggaacgggcctcccacgcggccagggcatgccccagatggagacggcccgtagggctgggggcgaaccttgttactatgggggaatccatgcggcgccgccaccataaaaaagcgcagccgccttttcaaaccctttccggaaaattattgcggcttgacagaaagaggccgggaaagtaggagagttggtccctttccctgcaccttcaactttcagtacatgctttctcttctcaacatcaactccgcctccgtcatgggctggctggaatcagcggccacccagcaatggattgtgggcatcctgctactgctcctgttcatctgcttcatcaaggaatggatgcccgtggaaatcacggccctggcaggaaccgccgtactcatgcttacggggatactgagcacgcgggacgtgctgtccagctttgccaacagcggcccgctgacggtggtctgcatgttcatcctgagcgcctccctggaaaggacggggctgatcggggacctctccaagcttttcaacaaggtagccaaaggccgggagctgaccgcgctgctggtcatcacgctgggggcgttcatggtctcccccttcgtcaacaacaccccggtggtcgtcatcctgatgcccattgtgctggccttctgccgggaccacaacatcgcggcctccaaactcctcattcccctctcctacgccaccatcctgggcggcacctgctccgtggtgggcacctccaccaacgtggtcgtgctgggccaggtgcagaaactgggctatgaaggcatccagatgttcacggtaactcccatggggctgatttacgcggctgcggggctgctctatctctggacctttggccgcaaatggctcccgtcccgtcctaccctgtccaccatgctccccggcggcatccagcgcgacttcctgctccaggtcagaatccccgcggactccccgcacatcggcgccactcccgtcagcctcatgcagtccgaactgctgggcaccaaaatcgtggaagtgcgccgcaagggcttctccatgcaggaggaactgcagcacatcaacctggaggagggcgaccgcatcctcttcctgtgcaatgccagaaaagtcaaccaggtccgggaggccaggggcgtggacctgggctgggacgacagccgcggactggaaacgctggaacagcgcgacgtgcaaatcgtggaaggcatgattgccaacaattccgaattcgccggactgtccctgtccgaactcaagctgcgccagcggttcaacatttttgtgctcgccatccacaggcagggcaagaacatcacggacatggggccggataccaagctggccgccggggacaccctgctgctggaaggcccgcaggaagggatgaaccgcatcctgaccaagcagcgcatcattcccctgagccagcgccccgcggacgcgcacaaccgcagcaagcagggctgggccatcctggccatggggctgttcatcttcatcgggctgctgggctcctttgagcagtacggggaatttttcaaattcttcgcgcgcttcaaccccttctacctcgccttcatcggcgccctgatcgtcgtcatctccggctgcgtcaagccgaaggaagcctaccaggcggtggactggggcatcatcttcctgattctgggcatgctgtgcgtgggggaagccatgagcaagaccggactagccaaggccatcgccttcggcgtggtggacaacataggccccatgggctgcctggtcgccatctccggcctctacctgatctgctccatcctgacggaaatgatttccaacaacgccgtagccgccgtcatgggaccgctggcctatgaaatggccctgcaattcgacgccaaccccatccccttcatcctggccgtcatgttcggcgccagcgccagcttctccacccccatcggctaccagaccaacacctacgtgtacaacgcaggcggctacaaattcaaggacttcgtgaaagtagggctgcccctcaacattcttctgtggatcatcttcacctgcaccgtcggctggctgtacccgctcaagtagaaaagacgattctgcggaaaaggcttcccggcgggcaatccgctcttccgtgtaaaaagtcaggattcatccggatcacaggaaaggcgttctttccgtatcttctgacgcatgggttctgaatgaagataaagtgcctcctcattcaagtaggaatccggctgggccatcgtatggaaaaaagaaagaatggtctcaatcaggggcgtgaattccttcttttctgttaacgaagcaagcttttcacttacccgcacatacagggaatcaggctggtgaatcacaggtgacaagttactgtactgaagaaatactgatttataaaagaattggcccaaagcctgctgttccttctctgaggcgggtggctgaagggacatcacgttctgaccggcgttaatagcggctttccaggcgtcaactgtcttggacatatctttttccccatccatggccagcgtaagggcgcacgcggcattccatgccttttgaaggtccaggatgacttgacgttgctgtttttcagaagcgcccgcgtgtttgtcacggaataggggatcataaccctctctggataatcgggagggcatgcggagggttgcgccttccaatccctcggcaatcatcgcctggaactgctggccgttgagaatgtccgcgatctgtttccgggaggggctgttcggagatagtttggagtccagctccttacaaatatctctgatttgccggtctctccaattcagggcgaaaaaattgtccctgggaccttcaaaaggatcaaaaatgattttttcaagaaaaccttgatgaagcggatccgtggcttttgcacgcctggccagttcttgaactgcctgcaaatagtcttcatccggaaattttctgatgtagtcagccatctgtgtaagctccaccctggaaaaccgggaaagatcattgaagataaagggaatattcttaagaataagctgacggcattcggcatccgcctttgccgcggccttccattgcttctccttgatgcattgacttttctgttgctgaacaatttttatttttttccaataatccggactctcctgattattggaaaaagccggaaaggaaagcaggctcagcaagaaataagataatagtttattcatgttttctaaaataattcgggaatattaaatagagaattttattgttatcagaaactccgccactaattcctgcaccgtcatagtctataatagcacagtgggcatcatcgaaacaaagccatccaggctcaggtaaaacagtggaagccttgaaccatttccacccttttattgttgtatttggtgatatccattctgcaactatgggggcccgtgattggacgaggttgatggtgaaggtaggaatatcaataccacaggaatggcagtggtaaaatacaaatatattacatttgctctgattataaaaattattcattccaaaggcattatgcccgtaattctttacttcttttttaagaagagccgcttccgtataaagctgttttgttgcggtatccaatggaggagaagcgttacggaaaacatcttccaatttgtcaaaatcataccacggggtcaatttggcataagtctttttcatcaaatctgcgatggcactattaataaggtttttctcatgctgactgttgactacccctacgcaatccgggtctcccctacacaaaaaaggagatttttttccaccatacgcatcttcccgccgagtatatgtaaaaattttaccattgattttagaacgcacacggtaaattcccggagtattgcactggtaggtacatgttgttccatttccaacttcaacccattgggtttcaaaattaagtgtctttgatgctcgaagccggcatatttcccatgtgataatatctttaaatttgcttttttgtcccagcatatccttattcaacgccatttctatgcattctcccttaatcagcaatactctactgttctccgtaggcgcattttgcttccgcacggaaatgtccaccacaacaggagtgacgaaaagggtaattccgtctagatcttttttccccggagccggattgtaataggtctgggaatattcaatgtcaaacgtatgggtgccgggcatcaaaatgtggggataatcccttcttcccttggaaatatcatgacctttgccgctttctttcagccattcctgtttttttcccttatcgtccgtaatggaaatagtgcaaccgtcatctgataccagagccacgaaaccgataccgcaaggctgaccagaaaaatcgttgtttttgtcgtcgtcatattcagggcgtttacgggaattgggagcctccttaaaagtgaaggagacggaataattctccttgtgaggttttcgaggatcatcaacaatggttgagttaggttttttgacatggccttccaatacaatcccactcttgaacattctcagtgagaagtatctatcaatgttgagctggtccggcaaatccggaatccggagcctgatcccacggtacattttaccttccgtggtgattcagatgtggacccatttcattatttggggctgtctctcctgtaaaaagaaagacagccccttaaaaatccagcacccgggagtcctactccctcatcagcgccacgcgcatggactggcacttgagcagggcggcaaaggcggcgtagtccgtttcccggtctgaggaaaccaggcaatactggtaccggggcaggcaggcgtcctcccgcgcggcattgcgcaggcgcagggagatcacctcgtcttcatccgtctggcggccgcaaaggcggtttctcagctcttcctgaggcacgtagatgtagacgtccgtatagcatttgggaagaatgccgtccacgcaggcgcggatctgctccgccccctgcacgtctatgtccatcaccacgtttttcccctgttccagaagattcaggatgtccgccttcagcgtgccgtaacggttgccgtgcacctccgcatattccagaaagtccccccgctccaccctggcggcgaattcggcggcagtcaggaagtggtagtccaccccgtcaacttccccggacctgggacggcgcgtcgtgcaggagatgctgtacacgcacagcccgttttccgtcgcgcggcggcacaaggtcgttttcccggaaccggaaggcccggacaccaccagcaaagttcccaatggctgtttcatggctgttattcgatgttctgaacctgttccctgattttttccagctccgtcttggccgccaccaccagatgggccagcgtggagtcgttcgccttggcgccgatggtgttgaattcccggaagatttcctggcagaggaagtccaggggcctgcccgcgggcgcggacgaaccgcacaaggtgcggaactggtcaaaatgggaggaaaggcgggtgatttcctcggaaatgtcgcacttgtccgcaaacagggccacttcccggatgatgcgttcatcgtccgcagaaacggacaggtcggcctccgccagacgcttgagcatggcttcccgcagcctgacgggcacggaaggggcgtgctccgcgatgctgaggcggaattgttccagcgtatccagcttgcccagcacgtccgctttcagattggctccttccgccgcgcgcatggcggtaaaatctttcagggcggccttgagcgcctcttccaccaccggccaagcctcctccggagaaagggcggcttccgccgtggaagcgatgatttccagccgcagcaagtcggacgcctggaggggcatgggctgcccggccaggtcagccgcgcggttcagcagccccgcgagggaggccagcttgttttcatcaagctggagggagccgtccgcttccgccagccgttccacggagacggagacgcccacgcggccgcgtgatacggccccctggacgatggagcgcacgggggcgtcccattccgcatagctgcgcggcacgttgacggcaatttccgtctgtttgcggtttacgcctgatatttcaacaaggatgttgtaacggtctgtctgggcaacggctctgccgaagccggtcatgctgttcatggttacgggtcagatttaggttaagaatgggagtaggccttcttcacctcgtccgccacgatggaaagccccttgcgcaggagttcctccgtctgggtgaagctgatgcggatgcattcatgccggtgcggccagggttccccctcctccggaagggcgaagaagaagtggtggccgggattcacaaaacatccccgggccttgcaccgttcgtagagttcctggcacgtgatgggaagcccctcgaaccacagccacaggaacatggcgccttcactcttgtggacgcgccacgggatggattctccgaagagttccggcagcagggacagggcgaattccgcctgtccgcggtaaaacggcgtgagggtttcacggcagacgcgctccagcgtgccgtcttccagatagggcgttaccagcgcctggcccaggttgttcgggcacagggaggaggtggtcaccatgctgaccacggcccggatgacgtccgggcgcgcaatcacgatgccggtgcgcgtgccgggcagaccgattttggaaaggctcatggtcaggatcatgttttcatcccaggccggcttcacgggcacaaagcagatgttgggcagcggcggtccgtaggcgttgtcaatcatcaggggcaccccggcgcgggacgccatctcccgcaggcggtccagctcctcatccgtcaccacgttgccggtggggttcgtagggcgggacatgcagacggcggccgtttccgggcgtatgtccaggcggtcaaagtcaatcacgtacttgaacgtatggccgtccagcatgcggatgccgggccggatgccccggaacatcacgcccccgcacagggactgggactggtagcccacataatccgggcacagcggaaaaaggatttcacgcatgcctccgcccgggcaaggccccgcgagcatgttgaacagcgtgaagcaggccatctggccgccctgggtgatcgccacgttctccggcgccaggttccagccgcagcgttcattgagaaaacggaccagcgcgcgaatgaaggcggggtcaccgcccggatgggcgtaatggcccaccagcacgtcaaactttccattccgcaccagctccgccatgctgcggcgccagagttccgtcacctcaggaatgacggcggggctcccaccgttcaactggcacaggcctgtttcctccgaatggagggccttgaacaaatcctccatcaaatcatcaatacccgttctggccgtcaggtggcctccaatctccgataattgcatcatgccgcgggcattgtagccgcatgcgcgttttatgcgagaaaaatcattgttccgcagggcgcatgaacagtttgactttcccccccgttaatgttcataatccccggcatgttcaatatcgtgcgattcaccaggcgtacctgtccggcgctggcccttgcgctggccctcacctcgtgcgacagcggtacgaatgaagcccttacctcctttattacgggaaattcctcctcggaacaccagcagctccaggcccagctccagcaggcgaaggacgccctggcccagatagaccaggaaatcagccgcgcggaatcccacgacgcccgcgtgaactacaatcttcaaaaacggctttccaccccgggaaaagtcaccacgcctttcacggtgaaggatattgacattctgccctccaagcgccgcgacttcgagcacctgtgctttgacattgaagacatgcgcaagacgctggctcagcgcaagcaggagttccacgccctgcaataccagtataacgcgtatgccgccaaactggccgaattcaagcagtcccacccggtagattaaccccaccccacgtaacccatgactgactcaccttcccccaagcagccgtccgacgaggccctccctccttccgaagacgaaacccgcttcgcccccagggagaacggcgaagaacacaaggacggaacctccgcccctgcggctaaaaaacgcctgaaaacctccctggacgttgtgtccgaacacgccgcggaagaagaatcggcccggcaggaagacgccgaacggaaagccaggggagacgcccttttctggaatctgtgccttgggctgttcgccctcatcgtcatcggggccggctacatcgtttatgaaaaattctcccagctcccggacccggtcaaagacgcgcgggaggcgctggaggccaatcactcccagctcctgaaaaagcaggtacagctcatggaaatacggaacaggaccgcccccaaggaacagctcctcggcctgctggacatttttgaacatacggcatccgatctggaagagacgcagaagtccattgagaaggagaaaatgcgcgtggccggcatccggggggaaatccgctcctactttgaacgctaccgccaggacgccagggccaaggcccgcggccgcaaattcgacatcctcagaacatcccattccggcaaaacctacctgaacgtggaaatcacccgcgtggaaaatgaattcgtgcgcatcatgcacgaacaggggagcacctccattccggccggagacctcccggacgacatccgggaaatgctggcctacggcgaccccctgaacatcacggccatgaaccagacggacgcctcccttcaggcccccgtgatccgccgggcgccttctccggctccggctccctcccccgctccacagtcccccaaaaagaaagtggtggtggaggacctggacccgcccgccggaaagccgcaaattgaaacgcccacacacacgggagattcggacggatcctcttccgggaacatgtgggttcctcccgcccattctccgctgccccccatgtaacaatcatctccatattatgaaaacactcatattacccctcgtggccgcgctccttgccggagtcgccggagcttccgaagcctggagcaccaaccccgcagaggccatgcagcaggccgccgcccggaaaaagggcgtgatgctggaattcaccggttccgactggtgcggagcctgcaccatgcagaaaaagcaggccctttccctccccaaagtgcaggaagacatcgcccgctccttcattcccgtggaactggactacccgcgtaaaaagcagcaggacgaacagacaaaagcttctctggaaacctacaagaaatcctacggcatcaccggattccccacgctggtgtttgcggacgcccaggggcgccccgtccataccgtcgtaggctactccaatccggaccaggtcatgcaggatacggaaaaggcggcggaagccctcaaaacgcagcaggccctgacggccaaactggcgggacagcttacagagcaagagcgccgggacgccctggtccagctgctgaacacggttccccagtccagcatccgcaccttctataagccggctctggaagaactggcgaaactggatccgcaggatgcttccggcatccgcgccaaactgaacaggaaagagctgctcaatacccagagagaggaattggccgatacgttccggcagaaaaacgtccacatcctggcggagcaaaagcctgacgaagccctttccatcatggacggctacctgaagaaggacgggctgcttccggaagtcaaacaggctgtcctcatgcaagaggtgaacctgctcatgcagcaaaacagggtgaatgaactggaacggccccttaaagaagccattgcgcttcttccggacagctttgaaggaaaaaggtgcagcaggcttctggaaaaactgcccgaaatcaagaaggaacggggccagctgaagccgggcgaagagcccccgcttccccccggagccatccgggccactaaaatgatcgttcctccggcgcccgcgaaaaaataacctattttttcctgccgggtaccgggttctccctgcccggcaggtccgcacatggacctttccgccaaccacatcctcgtcgtcttcctgctcactacgctggccggtctcgccaccggcatagggggcttcatcgccttcttcatgaagaggacggatacgaagacgcttaccttttccctggggttttccggcggggtgatggtgtacatttccctggtggaactgctgggagaggcgcagcaccggctgatggaatttgaaggtcacacggcaggcgcatggattgccattgcctccttcttcggaggcattgccgtggcggccctgattgactacctggtgccggaagacgaaaacccgcacgaagcgcgcggcccggaagacatccacgggcagggcagcggggaattttcctcctccaaaatcaaaaggtccggcatcctgttcgcgctggccatcggcatccacaactttccggaaggggtcgccaccttcgccgccgggctggactccctgacgctgggcacgtccatcgccctggccgtagccgtccacaacattccggaagggattgccgtggcggtgcctctttactacggtacgggcaaccgtaaaaaagccctcttctattccttcctctccggcctggcggaaccggtgggcgcggccatcgccatgctcttcctgttccacttcctcacccccaccgtgctggccatcctcttcgcttccgtggcgggcatcatggtcttcatatcctttgacgagctgctgcccatggcggaacgctgggggcaccaccacatttccatcatgggcatcattgccgggatgctgctgatggcggttgtcctgatctgaccggccctgctgcgggaaagaaattttccgtgtcctggatgcgggcatattgagcatttcccggcgtcagggggtctaaacggaaacccccttctcatccatgccggactcccctgctacccctgctacccctgctacccctgctacccctgctacccctgctacccctgctacccctgctacccctgctacccctgctacccctgctacccctgctacccctgctactcctgctactcctgctactcctgctactcctgctactcctgctactcctgcttctcctgccgtttccgccgctccacagtcatcttcctccccttcccccctttcctgctggaaaaaaggcttccgccgttatgcggatttccggggctgcacttcccgggcgggattctggtggttcatggctcttcccctcctggccctgattccggccctggcaggctacatcctgacggactggctgcacattccggatacaaggctgagcgtttacggggacgccctgaccatcctcctgtgggcagccctgatagttccctgcgcggcggcggcattcagacgcctgcatgatacgggcaggagcggcctctggattctttccgtgctgcttcccttcggcctggggcacctgatttttttctacctgacgctgggagaaagcaagacggacggcaacaagtactgccgccgcgcgggcgcacagccggcaaacgcctccgttactcccggagaacggaaaaagccgcctttcacgccgttttacctttactggctcatcagcctgcggaagctgaccacggtggccgggcgcgcctcacgggcggaattctggtccttcttcctcctttccgtcctcctgttcctgccgctgggctacagcatgatagacgtggacagcaacccgctgggcttttacgtctccccgtcccgccaaatcctgctgtacgccgcccacccgcaggataccctgatcctgctggcgcacgcctgctttaaccccaccttttactttttctaccagtccggagagctgagcatgctttccctggagcttctggcggctgtggcggggctcaacatcctgttcaacctgccggtggccgtgcgccgcctgcatgacagcagcctgagcggaaaattcatcctgattcccatcctcattttcatcgttaccttcctgctgattttcctgctgcgcctgattccggaggacatgacgccctacctgggctatctggggatggcctccagcctgatggacctgttttccatcctcttcctgtccatgatgctgcttaaaagctctcccggtcccaatgaatatggcgtgcttccgcaaaaaataaccgtatcctgattccaggatacggttgaaaaacagtcaacgccgcaggaggccgcgttgttcgcctgcaaacgggggaacgtcagtccccgaagcatacgcccaggtcgcgcgccgtgcgcaccagctggcagtcggggtccaccagcttcagggttttcacggcttcctcaatgggcacggcagtcatctgcgttccccggagggcaaccatgcagctgaacttgcgcttttccaccagctccacggcgtaactgccgaaccgcacgcccagaatacggtcataggcgcagggggaaccgccgcgctggatatggcccagcacgcaggaacgcgtttcaattcccgtggcttcctccagtttcttggagatcaccttgccgatgcctcccaggcgcacttccccctgggtcttttcatccagcagcaccagttcgtccgccaggcgggcgccttcagagaccactaccaggatttcccgctgcccggccgccttgcggtccttgatgcatttcaccacgttttcaatggagaagggaatttccggcagcaggatcacatccgcgcttccggcgatgccgccttccagggcaatccaccccgcatgccgccccatcacttccaccaccatcatgcgctggtgcgcgtttgcggtggtttccaggcggtccagggattcggagacgatggaaacggcgctgtagaagccgaaggtgacatcggtcgcgcccaggtcgttgtcaatggtcttgggcacccctaccacgggaaggcctatttcagaaagcagcagagctgtggactgggagccgtctccgcccacgacgatcagggcgtccaggcccagccgccggatggtggccttggtcttttccagcacggcgggttcaatcgcccccttctggtccacgcctaccttgatggcgaagttccccttgttcacggttcccaggatggtgccgcccttggcgcgcaagccgcggcagcagacaggagtcagccattcaaaccgttcattgccttcctcggacagaagcccttcaaaaccgtcgtaaaaaccgacaacgttccagccgcggcgggaagccgcgcctaccacaccttcaatgactgcattcaacccgggagagtcacccccgctattcaaaacaccgatgttcatattcggtgcctcttatagcagaaaattccggggccgtctacttcctatctcttttctgtaccagatttcacgggaagctggacaaactccttgggatccttcatgtccatgccggaagcctgccagttttcccacacccgccagccggtggtcatcatctgcttggccaggggatagcggttcgcagagccgagcaccacaataatcatgcgctgcgggtaaatcacctccgtccccgtctgggggctgcggcgggagatggcgttgcgcgtcacgctgagcagcaggcaggggccggcggcgcgggaggttcccgccttgatgccgtccacgccgggagagctcatgagcttgttgttgttggaaatatcatacatcgtcctgcccttggtctgggactgcacctcaatgcggcggctcgcctgggaaacgatgtagcagaaggccgggttctgcatgctgtaaacgcccagcagggccatgtccagcgcgcaggaggtggaaacggagttgcccgcgtccaggccgtggggagcggtgaagcgcgtcttggccatcctcagggaacgggccaggttgttcatttccgtcacgaaggcggcaatgggtgagccgccgccccggcgggacaccaggtcacggcccacaaaggaggcgatggtcagggcggacacgttgtccgagcccagcagggtggaatacagcgcgtcccggagcgtcaggcggtctcccggctggagatccatgggatttccggcgcggaggccgaaggcttcctgcggcacggcgatgaaggtgtccagcggcaggcgcgtgcgggccacccagtccagcgtcaccatggcggtagctacctgggagaggctggctacgggccgttttgcttccgcgttggaactgaaaaggagtttgccggaattggcctcaatggcgatgtaactgggccgttcctgcgcctgggcggagaactggaatacacagaccagggtcaagaggaatagagatagctttttcatggcgggaccggcgggatagtgcccgttccccccacgtttgaaaagtctaaaatattttccgtacaacacttatatgtcatgacacggaaaaacgcattgacctttcggctcctatcctatttgttggaggaagccgtttcccgcaaacggaagcagtccggacatccccaccgccatgaccagcattcaatttttttacaaccgggactttccgggaaacgccctgcgctccaacgcccgccaggcgctggaccgtctgggcatgaaaccggagatgcgggaaacggaagccgcgccggagcaggtcggcgctccgcttcccgccctcgccattgacggggagatcgtcgtttccggcgtggagccctccgtgcgcgagctggaaatcctctttgaagaccacgcgcaggaaggggaggaagattccgcctgcggcgcgtgcggcatggagtgcggcggcgtgaacggcacggagcattgccccatgtgcggccagcacggggaaggcggcagcgtggcgggcaggattatcggcttcgtgatcctgctcattattctgttccttgcggttaaaatactgtcctgaatctttccacgccgccttcgtcttccctctttttacagctgccccacgcgccgggattgagccggcatgcgccggcgcagtcgccgctctgcttctgggcgccttctttctgcgccgccgccccttccggaaatgggcgtgcgcagcggcggagttttacgtggccgtttacggcgtttccagcccatgcaggcggtcttgataatttcttgaattcccctttccgtcaggacacagtaacggcatgcgctccttcttcggttccattctcctgattctggtgctggccgcccttggcgccaccatttactaccactggtccaccaactcccacctggagttcgaactccgcaaccctgacgaaccggaaaaaaccacccaggtcatcaacatggagaagcgggctgccgccctccaggcggccccggcggcagaagcccctgctcccgctgccccccctgcggaagaagttccggctcccgccgcggggataccggaagccacggaattgtaagggcgccactttccacaccatgaaaccggttatcggatacacgctgggcgaccagtcaggcataggcccggaagtcatctccgcagctcttgcctccggagagctcccggaaggggcggaataccgcctcatcggcaagagggtgcaggtccgcatcggcaggccgaatgcggaatccgccaagcacgcctttgaccatctggaacaggcggcccatgccctgcgggaaggaacggttgacgccgtcgtcaccgcgcccgtctgcaaggaaaccctgcacgaggcaggcttccgctggccgggacagacggaattcttcgcggaacgcctggatacggacaattacgccatgtgcctgaccggaaaacggctgacggtgggcctggccaccatccacacgtcccttcaaagcgtgccgtccctgctgaacacggaggaactggtccgcatcggaaccctgttgaaaaatttctgcctccgcaagggaatcctccgcccgcgcatcgccctggcggccctgaacccccacgccggggaacacggcgccttcggcgacgaggacggaactattattgccccggccgtagaacggctgggggccattcatccggacgcggaatttgacggtccgtccgttccggactgcgtgtaccgggacgccgtggaagggaactatgacgccgtgctggccccataccatgaccaggggctgattccgctgaaactggtggacttccataccgccgtgaatgtcacgctgggccttccccgtccccggctgagcccggaccacggaaccgccttcaacctggcgggcgccggaaaggccaatccgtccagcaccatccacgccttccagctggccgtaaggatggcgcagacgcgttaacgcccctcttctttccggagttttttccgccacacctctgccacccgttccgaggctgaaacccaataccggaaggtttcttccatcaggggatcactttcctccctttctcctttattccacaaaagcagagcaatcgttaacagatctgcggcggaacgttccaaggcttccctgtcatgctccctcttttggaaccagcaccattgttcaggcgtcagggccggaagcctggaaaacctttccgccatctccacctgccggtctgcataacaccggattaacaaaaaacgcctctcacgggaaatccggggaaccgtatccgtcaacaaccccagaacttcgccactccagcaccgttgcagcgtttcttccagactgccgttaaccagcgggtcgtgatctatcttataagacagggaagattcaggattcaacttccaggccagcagcttttcataggagtctccctccggggatgacggcagaggcagttccgcctgcgcgatgaaatcatccagggagtctatcgccgtcttggacgcccacatcatcctgcgcagcgcagaaaatccctcttccgcctcctcatgggtaatgacgccgtcatcctccaattccgataaggaaactatctcctcctttttttcccgtttcctgctttccgccatttttctgaacaactgcacatccacgtcagccacacggcaccactcctgcgtggtagggggtccggacatgaacgcctcccgccacgccttttccatccggtcagcctcccggttcaattccttgaccacttttttgcaggaggaggaatccttcacctggctgccaatcgtccccagagccctggtaaacgtttcatcccccaccacatccaccatccggacgccggaacgggcgctcccgcagcagaggaatccggcaagaagcgccatgcagaacaatttcaccatgaacggatgattggcaaccgtacgggaaaagtcaatctcttccgttgccgcgttccccattctttccttccccgacgggaataaaatgcaggaaacggcatcttcccggaaacaaggtaaaaaataggcttgctttctgaagacaatcattgcaccttacttgcccgcaaggtgcgcaccgttcgcacgacacatttctaattatcacaagaccatgagaaattacgaagctcttatcgtattcaacatgaagggtacggaaacccccgttgaggagttgatcaataccgtagccgccacgatgaaggaagaaggcgccgacatcaccgccacggaaaacaccggccgccgcgaattcgcttacgaatccaaccacctttccgccggccagtacgtgacctacacgttctctgcggaaccttccgccatcaagaccatccgcgaacgccttcgcctgaatccccagattcaccttcagtactacaaggtgctcggctaaagccggcccatgcggacgaagcatccgctccttgccttttttcaaaaagaaccgcctccctaaaggggcggttcttttcttatggcctgttccttccgtgcacggaagcagggaagccttgttcagtaaacgtttgccgccctggaggcaatgttcctcagcagctggcggatgggggcaacaggaggcagattttccacgccgtatgccctggcaattttttccatgtggggaaagctgatccaggtgctgccctccttatcctcccatacggcaatgcgcagaggcagttccgtggcaatgcccgggttttccagcatcaggttggtgcctaccttgggagagccgaagatgacgaccttggaggggggcatttccagtccggcttcacgggcgttcttaccgtggtcaatcctggcaaagacgggaatggatttttccgccagaattttttcaatgcgctccatggtttcgtccacgccgaagacgctttcataaagatacagggaatcgtcgtccagatggccggagcccagcttgggatccagcgccccggcgatgcggcgcgccagattggtcaggtccacgccctccttgttcgccgtcagcgtcacgcacacgagttcggacgggtccgtgaaccggcagatgtaggaggagaagccgggaacgccgcctttaatatccatcaggcccttgtggtgagggaactgccagccggccatggccggaacgattttcccgttgtccagccggatgggcttgtaaatcatgtcccggtgcttttcatccttcaccaggatggagcccgccaggcaaatgtcccagaagctgatttcctgcggcgtggaccagatgtccgaaaaaccgcgcagggaagagcgcgcgggcggcggaacggatttaacggcgccgtcctttaccgcatagcccgccgccgtttccgccgggtccacatattccacacgggatttgaacagggaatgcctgttgccgtgttcgcgcacgttgtcctgctgcacggctcccagatccttcccgaacatggtgtgctggaggcccagcggctggaactggttttcccggacgaattcctcataaggcatgcccgccaccgcatcaatgaccatggacagaagcaggaagttcgtggcgctctggcgcacgtccgttccggaggggaattccagatcgttcagcctgaccagggaaaggagttccgccggatcataatcccggcctatatcgaactggggggatttcctgtagtccggaatgccggaggaatgctgaagaagctggagcacggagacattctgccaggcttccggcaggccggccacatagcgggacaccttgtcatggatgtccattttgcccttttccacgagctggaaggcggcaatggcggcatatccctgggagatttccgccgcaggccacaaggtattggtggaagacagcaggcccgtttccgcattggacaagccgtatcctaccacgcggggaatgtagggggcctggacaatcgcaagggtcatgccgggaattttttcctcctgcatgaagtcgtaaatcaactggtccatggactgcccaaggtactctaccctggaatttccgcggccctgggccgggagctggatggttgcagattcttgagcggacattttggtggggatgttatttgcatgtgcgggaaggccgcccagcatgcacgcgcatgcgagaatccctcctgttaacctgaatgatttattcatgggtgtctttttataagaccgcattccgcgcatacggttcattcaatttgtcatcactatccccaaaataacgcaaaggcgggagaatgcaatcctcccctgccccgtcctccaggaaaagggccctcccgtcccggttccgtgatttgcgggctacagggaaacgaagttttccagcagcttcacgcccagtttctggcttttttccgggtggaactgcgtggcgaccaggttgccgcgcctgatggcggcggcaaaacgcacgccgtaggtgcagaaggcggccgccagggattcatcctccggctgcggataataggagtgcacaaagtagaagtacggctccggccccatgcctttccagatgggatcggcgggattggaaagagtcaggctgttccatcccatgtggggcaccttgagttccgattccgcaaaacggaccacgcggcccttgaagatgcccagtccgggcacctgttcgtcttcctccccggtttcaaagagaacctggtagcccacgcagatgcccagaaaaggcttgtcctgccctatccacgtccggatcagcggcaccagctcctggctgcgcagcttttccgcgcagtcgccgaaggcgcccacaccgggaagaaccagatgggtcacgcctgccgcatcctccggcgtgcggaccagatggccagtcacgccggcagcctcaaaggtgttcagcacgctgcggaggttgcccgcgccgtaatcaatcacgccgagcttcatggacttacagcattcccttggttgaaggcagcgtcccggcggcacgcgggtcaatggccgcggcctgccgcagcgcatgggcgatgcccttgaagacggattccgcaatatggtggccgtccctgccgtagagcacttccacatgcaggttgcagcgcaggttgttggccagggcgcggcagaattcctcgcacagggtcagcggaaagttgggcgcgtccggaaggcccccttccggaatgcggaagaccacatacgagcggttgctcaggtccatcaccacgcgcgtaagggtttcatccatgggcaggtaggaacagccgtagcgcgcaattcccttcttgtcccccagggcgttcttgatgcattcccccagaacgattcctacgtcctccaccgtgtggtgggcgtccacctccaggtcgccgcgggcctggagggtcaggtccatcagggaatggcgagccagcaaatccagcatgtggtcaaaaaacgcatggcccgtggcgacggcggcgcacccggtgccgtccaggttcagttccatgctgatgtccgtttcaccggtgacccgtttgcaagaagcgttcctcatgtgactcttctataccgaagccgcggcggaagaaagcaggaaataccgcatggggtaagatttgcccgcttttccgcgcaaaaaaccgcatggcccagtaatagggccatgccaccggagccccctccatcagaagaattccaggaggcttttatattaaacaacacggggtaaatggactaaacaggcccgacggacagaatgggtccagctttacttgatccatcctgtccatgaaggccatttctgcggcgctccccggagggtcttttctccgggaaacagccggattattttttcctggccttggcagcggcagcccgttcctcctggcgcttcttgtcccggtcttcacgggccttgcgcgccgcttccgcacgttccgcgcgttcgcgggcacgctgttcctgcaggcccgcgcgcaccgtctccgtcagttcctcatagtattccctgggaacctgggcggtgcggacttccgtcagggcctccatggcctcgtcaaatttcttctcgtcacacaggttccaggccttttccagtgcggcagagccagccccgttttccgggtcctggtttttcaggcgttccgcatccgtagcggccaccagcttgacgtccctcatggcttccagggagccggccgcaggttcaaaccaccggtccccgcgctccttgaccttcttgcgcaaggcccggtgcacttccgtgagctggttttcacgctcccggatggcggtctgccttttctggaaagcgtccatcaggagctggcgctgctctttcgtcagcttggggtctccgcggcgcttttcctcttcctttctcaaggtttcacgttccttttccagggctttttccttggcggctatcatgacctccagcttgcggttaagctggccggcgattctggaggcatccggataggcgtccgccaaagcggcggagccggggtagccgtcacgcaggcggtcgtacacagccatggcctgatagggattgcgcacggcaagcgccttgaagcgcttcaacagcttattggcctcatggtcatatttggtgcgcacggtcacttccgcctcctccttggcttcctgggcggcctgggctccttccaccagcttcttctcctccagcagaaccaccaccctggccctggccttgacggcggcgtcatgggcaagcccctggggattcttcttgatggtcttgtccaggtccgccagagcgctttccaggtccttggcgttcatggtttccggcttggcgtacgtcttgttgatcttggcggcctccagttcatccggagtcgccttcttgatggattcaatcagttcccttttaacggtcacggaatccttgatcccgccggctacggggaccaggaggctgacgctttccggcgtttccacctccacggtgcaatccttgtaaacggttccatccttgagttttacttcatccgccgcggcaagcggaacgagtgcggtcaacgccaatatgagggacttgttcataaatctaaggcttttttccagagtaatctgacgaatacgtatcttgcactttaccagaagacgccctcttggcgacaaaaaaaagcccggagccgtaaaaacggttccgggcccggagagataaaaaacaggctgtttctggcttacttctcggcaacggcttcttcagcggccggagcggcttcctcactggaaacgcggggggcttccacgatggccacgatcacgtcgccggccagttccgtgttcacgccggagggcagtttgagatcggcaatgcgcagggtttcacccagcttcaggccggagatgtcggcagtaatggcttccggcaggttcttcacctggcagacgatagccagttcatgaatggtctggtccagcacgccgcccagggctacgccggcggcttcgccttccagaataacgggaacgatggagtgaatgaccgtggtgtcggtcacggcctggaagtccacatgcaggcaggcgttggtgatggggttgtgctgcacttccttgaggagagccttcacgatcttgccgttgatgtccagggccaccaggatatgttcggaaacggcggaagccagcatgcgagcgaattcgcgggcgtcaacctggatattgacgttgtcaaaaccgggaccgtaaaccacgccggggaccaggccctggctgcggagttgcttcagattaccggagccgcaggctctcgtttcggccttgagggaatgggatgtagccatgttttatagaggcaatattgagtgttgattgataatgtttcctaatcgggttcaggcagaggccccgccgggatttctgaacccgcgtaaaccggtactcaggtcagggcgcaggactctgcactaaaattggctaaatgtcaaataatgatgatacggattctccgtcatgtatgcgctgcacggcatggcccagcaggtcgcccacgctgatgcagtccaccttggggccataggccatgggaacggtgtcggaggtaagaacgcgttcaatgcaggagccggcaatgcgttcgcgggccatgtcccccagcacgccgtgggacacgcaggcaaacacgcgctgggcgccgcgttccttcaggatgttggcggcggcgcacagggtgccggcggtctccgtcatgtcgtcaatcaggacggcgtcacggccttccacatcaccgatgacgttcatggcttccacatgcgtggcgttgacgcggtgcttggcgacgatggccagctccgcacccagggcgtcggaataggcgcgggccattttcacgccgcccacgtccggggagacgacgaccaggttctggaggtcttttacatagtgctcgcgcaagtggcggattaaaacgggagcggcgtacaggtggtccaccggaatatcgaagaagccctggatctgggcggcgtgcaggtccatggtcagcacgcggtccacgccggcggcggtcagcaggttggccaccagcttggcggtaatgggaacgcggggctggtccttgcggtcctggcgggcgtacccgaagaaggggaccaccgcggtgatgcgtccggcgctggcacggcgggcggcgtccaccatcacgcacaattccatgatgttatggttggtgggggggcaggtgggctgaatgaggaaaacatccttgccgcggatgttttcatttatctttacaaaactttccccatcggggaaagtgttcaccgtgacgtccgtcaactgaatgcctacgctttgcgcaatgcgctccgcaagttctctgtgtgctgtaccgctgataatcttcataccggaaactgaaaagcggacgcattctgaacacaggtccacataatcgcaatacttaattctcacaatttgatttttctccatgatgggttcccccgttccagatgccaaagagagatttctaaccgtccccatgattgccgccctggccgtgtgcgccatcctgctggcggtaccctacctggcgtttcccgaattcggctctaccgggaatgaaagcagcatccagtggctcgtttcctcctggaacaagcagacggattacgaacacggctggctggtggtccccatcatcgccttcatgctgtaccacgccagaaagaagattgcccaggcgcccaggcgcatggactggcgcgggctgatccttttcatcccggcggccctgcttctggcgctctccttccgcgtgggacagccccgcgtggccgtgggcgcgcttcccctgatcctgctgggcggagcctggtacctggccggaccgcagatcgccaggctgtgcgccttccccctgctcttcttctggctgtgcattccccttccctctttccagcaggctacggtggagctgcaaatcgtcgccacggagctggggcacctgggtgcggcccttttcggcgtggatacctacctgcaaggcaccaacatccgctccaccggcggccactgggacgccttcaacatctcaggggggtgcagcggcatgcgttccctgatggccctgctcatgctgtccgccgcctgggcctacctgtccgacctgaagttctggaaaaaatgcgtgctcttcctcagcgccattcccctggccgtcatcggcaacggcgtccgcatcaccagcattgtggtgctggcggaatacggggaccccgagtttgccgcgaaaacctggcacgactggtccggcctgctgttcttcttccccatctgccttctcggcctggcggccgtccactccctgctggccggggagctgatctggaagccgtcccggcgcaaaaagctggtcgttaaaatgaacaagtcccactaagcgtttccgccgccatgaacattaaaacgctcaagattttcgtccttcccctcctgctggccgtcacgctcggcggcatttacctgatgccgcgcaagggagaggtgcaggattcgtccatcagcatggccctccccaccggcatgaatccggacggctggcacggcacgcgccggcaggagtctgaacaggagcgcggcatcctggctccggacacggaattctccaaggcggattacgtgcaggaagtccccatcagcctggacgcgccggaaaccgctcccgtgctgtgccgcgtctccatcgtcaaatccggccatgacctgaacaactccatccaccgcccggaacgctgccttccggcccagggtcatttcaacctgacgggaaccaaggtggaggtgcccgtggaaggccacggaattatcaggatgaccaagctgaaatcccagcaaaacatcactccggaccagccgcagcccatcattctggacagcatgcactattacgtgttcattggccaccaccacatgacggaggaccacctggcccgtaccctgacggatatgaaggacagggtgctgtacggcgtggaccagcgctggtgctacttccagatttccaccgcgtacggggacaagatcaaggtgccggaggaggaagcccggaaacagacggagcgcctcatcagccagcttctttcccaactggtgaagtgggacgaactggaccggtagcgctccccgccccgcggcagtcagcccggaagacggccttccagccatgcggaggccgcctgaaaaaggctgcacgtttcttccacgggggcttcatacagcatgggagcgggcctccggtgggaataaaggcggccctcccggtcgcgccggtagccggaaaaagccaggttggcgtccgccccggcgcagtgcccccagcggccgccgatcctgggcaccacgtccatgaagccgcccccgtcccgcaagtaggcgttcccccaccattccacgcaggccgggcgcgcgtttttctgccggcgcgccacggcgtctatggtcaggaggcagagcggagcagcctgaacagactggcgcctagctacttccaccgcgcaggagccgccatagctgtggcccaccagcacgacgggcagcccggggcattcccggcgcagctcttccagctccgccgcaatttttccgcacctgtccaggaacacgccgcagccgcccccgtcccagtggtaataggccgtggcatgcgccacccctggcaaaaaaccgggaaacctcttttccacccggctcaggcaacccgccaccacgtccccgaagccgccgatgaacacggccaggtaaccgggagcgcttccgcgggaaagcaggttcagtgtcctttgaaaatgcatgacggagcccatgatggagaaatcacgtcaatatccaagtccataagacgttctggcttgataaaacctgcaaactgtccaaatgtgatggtatgcaagtaatcattcaccaatgggccttcaacggaagctttgaccagcttgcctccctgccccgccaggaactcgtcaacgactggttcggctacgacgtggagccaagcgcggagttcgccttcgccacggacggcgagtacctctggttcctggcctcccgcagcaaggaagccaccgttcatccggacgcccggcccggccagttcctgccggagctgtggcggtacgacctggcggaatggttcatggccgccggggacggcaccaattactgggaattcaaccttgcgcccaacggcgcgtggtgggcctgcgccttttccgacacccgccgggccaatgaagacattcccgccccgctggccgtggataccaagtgcattctgacggacgaaggctggtgcgccatggcccgcattccgctgaacgaactgcgcggcgtggacgtacgcgactgcaagctggccgccacgttcatcctggacaccccggaccagattttcctgactacggcggacgacctttccggcaacccggacttccaccgcccggactgcttctgcacccccattctcaagtaatccatgtctttggaagaagacatttcccgcatcctggggcctgaaaaggtctccggggctccggatgtgctggccgcgcacgccggggacaaatggtacgcgtccgtgctgccggaggcagtcgtcttcccggaaagcacggaggacgtctccctgctcctgcgctacgcctcctccatgaacattcccgtcacggcccgcggcggcggcgtgggatacgtggggggctgcgttcccgtgcgcggaggcatcagcctttccctggaacggatgaaccgcattctggaaatctccccggaagacggcgtggccgtggtggaacccggcgtcatcacggcggacctccagcgggaagcccgcgcgctgggctggttctacccaccggacccggcgtccaggaaggaatgcagcatcggaggcaacatcgccacgaacgcaggaggccccaggtgcctgaaatacggagtcaccaaggcctacgtgctgggcctgaccgtagtgcttgccagcggggaagtggtggaatgcggagggcgcactcacaaaaacaaaacgggcttcgacctcggagacctcttcatcggttcggaagggatgctgggcatcgtcacccgggccattctgcggatcatcccccatccggaagccttcggcgcgctcagcgccagctttcctcagttcccgctggccgccgccgccgtgcagcgcatcctgaacagcgggcaccttccctccgccctggaaataacggacagcttcaccctccgcgccgcccgggcctacctgggggacagcgccctgccctccggcagccgcggccacctgattgtggaagtggacggcaggcaggccgccgtgcgggaagaactggattccctctgcgccttgctggaagaatgcggcgcaaccgacatcctgcgcgcggacacggaagagaaggcggaagccatttggcagctgcggcgtgaattttcctacagcctgaaagccaccggcatgaccaagctgaatgaagacatcgtcatccccaggtcccgcctggtggacctggtggaattctgcgaggccatgaaccgggaaacggggctggacatcgcatgcttcggccattccggagacggcaacattcacaccaacatcatggtggacgattacgcggacccggagaagaaagccctggcggacgcctgcgtggacaggctgttccgctgggtgctggaacacgggggcaccatcaccggggaacacggcatcggcctggcgaaggccaaatggttccgggaagccgtgggagaaggagccttccacctgcacgaactggtcaaatccgccctggacccccggaatttgctgaatccgggcaaaatgggactcccgtaacgtaaaatagacttccatgatgcccccggacggggcatcatggcaaccgcacttcatgaacagcccgcacaagtccatcctagctgccctttacgaccatttcccggtcgcagatgccatcctggtgtttattctggaccatcccctggcctggtttacgcccaaatggcgcaggaaaggccgcatggccctgaaagcggtgcgccgctacgtcaattacaaccgcgaccttttgccgcccgagcgcctggcggagtttgaagaaaaccgcaacctgctgaaaacggccctccgccggggtgacaggcagcaggtggaaaccatcactgccaaactggaatccacgctggaatccattcccggcgcgctgccctccggactggcggaaaacgtggaggtgctgttcgtgattctggccattttcctgggcctgcgctgttatgtagtccagcccttccgcatcccgaccggctccatgcagccctccctgaacggcatccgcgccgtcccccaggagggagaccccaccctgatgaagaaaatcggggacatgatcctgtacggcggctcctatgtgcatgaaacggcctccaaggaaaagaaaatcgtccgcttcgagcccgctaccaaatacctcctgctcacggtaaccaacgtgattttcgacgacggctccaagctggaaattccggcggcggaggcggagacgcgccgctacttcctcaaccaggaaccgcgtttcgagtccgagcggcacactcccttcagaagctacctgccgggggatacgatcgtgaacgcccgctttgacgccggtgacctgatcgtggtgaacaagatggcctaccacttccgcaagccggagcgcggggaagtcttcgtctttgacacgcgcggcattgaaggcattgccaacaagggaagcagcaccgggcaggaaggcggaacgcactacgtcaaacgcctctccggcgtaccgggagattccctgtccatccgggattcccaattgatcgtgaacggaaaaccggccacggaatggaccatccagagggtagcttccggcaagcccccctaccagccctgcggctatgtggcccttcccgcccccctcagcctgctggacggcagggcctacatcacggaagggggaaccgtgcacctctccaatgataaaaaacgcccctacctgcgtgagtacgtggccctgggcgacaattccacccgtgaaaattcctttgactcccggtactgggggcccgttcaccaatacaacatcgtaggccccgccagcttctgcctgtggcccttcacttcccactgggggcttatcccctgattcccggccattccgcaggcacgctttccccgtcaagacatgactcaagctcagactattacaagcaaggccaagtccaacctggccttcgccctcattgaccttcctgaagaagaacgccgccacatggcggaattttacgccttctgccgtacggtggacgacatcgtggacgaaccgggaatgacgccccgagaacgccacgacgccctgaaccgctggatagaagtcatcaacggcggagacgttctggagctgacggagctggaagaagacatcatcgccctcatccaggacctggagctggacaccacccccatgctgcacctgattgaaggctgccgttcggacatctgccagcaacagcccctgaaccgtgacgaactgctggattacacttactgcgtggcctgctgcgtgggcctcacctccgcccgcatcatgggcgccggggaagccgcctacccgtacgccatcgccctggggcacgcgctgcaaatggtgaacatcatccgtgacgtggcggaagactgcggcaaatccaaccgcatctacctgcccagagaggacatggaccgcttcggctacaccctggaagacctgcgcggcagagtctattccccccagcttcaggaactgctgcaatatgaagcggacctggcggaaaagttcttcgcggaggcggaggaggaatacaaccgcctcagcccggaggatagggcggcgctcgttcccgcccaggccatggcgctcatctaccacaccattctggacaaaatgaaggcgggcggcttccgcatcttcgacatccgctaccgcgtcaacaccttccacaagctctggcttctgttccgcaccaagctggacatcgacccccagtcctactacgacaagtccaaggcgtactatgacaagctggtcggcttcctttcccgccccggcaggaaggatgaaaagtaagggccgctctcccggcgcgcagggcagaaaaccacggcctttccttccggccctgcgggcattatgcttgtcctgaaagccgtgttcctgtaggaatgcagcatgcaaactcccgcagccgccctgcttcttgttctcacaacactaaccgggctgtgcgcggcagcggactacccggaacgggctcagcgcacacaatccgccgggaaccatacctggtacatagacccggaccagggaaacgacggcaaccccggaacttccccctccacggcctggaagagcatgtccccggccaaccgcctcatcatgtcgcgcggggacacgctcgtcatccagcccggagagcatgcggcctctctggcgctcatgggggaaggctccagacaggccccggtcactatccggttcatgcccggcaggcacgttttcaagcacggtgccctggtctccggaaagccgcagatttccaacaccaatgacgctcccaacgaggccaaggctatggccatccgcctggtggaggccaaaaacgtacgactggagggcaagccgggagccaccgacatcctgctggagggaaaagccattttcgtctgcatggagcacgcggaaaacgtttccctgaacggcctgggctttgactacgtgcaccctaccatgggggaattcctggtgacggaagttgaaggaaacactatgaaggcgaccattccggacggtaccctgtatacggtgaaggacggctccctgacctggcgcggccccggctgggaattccggatgggaggatattccaaggtcttcgatgccgcctccggcaccttccagggccgctttgacccgggaaaaacagtcattaaagaactgtcccccggaaaaatcagcatcacgttcaaggaaggcgccccgaccatgcgggcgggacaatcctaccagaaccgcaacacgcggcgggactgctgcggatttttccagcacaggagcaggaacatcgtctggaacaactgccatatctactacatgcacggcatgggcgtggtttcccagttcagcgagaatatcatattcaataacttgaagatagcgccgcgccccggctccctgcgcaccaattcctcctgggcggacaacctgcatttttccggatgcagggggaaaatcatcgtcagggactgcgtgctgggagcctcccatgacgacgccatcaacgtgcacggcacccacctgcgcattgtggaccagccggcacccaataaaatcaccgtccggttcatgcacccccagaccttcggttttgacgccttcgcggtgggggaccggattgactacgtttcctgcaagacgctggttccttacgcctccaataccgtttccggcatcaaaaagctcaatgagaaggaaatagaactcacgctgcggcagcccaaccccgggaacatccagcccaacgacgccgtggagaacaccacctggacgccctccgtccacgtcagcaacacggtttgccgccacattcccaccaggggcttcctgcttaccaccaggaagccggtgctgattgaacggtgccggtttgagaagacgggcatgcctgccattctggtggaggatgacgcctccggctggtatgaatccggtgtggtcaaggacatggccatctcccgcaacaccttcattcaatgcggggaggccgtcatccagatcgttccgcacgccccccagccggaaggaaacgttcacgagaacatcaccatcaccggcaatacgtttgacctcaggaacggcaccgccatccgcacccgccataccggcaacgtaaaggcggagaaaaacaccttcaccaaagacgggaaaaacattcccgcggagaaggcagtggatatccggtagggagcctccccttttaccggtgccgtgaaacatgcaccgtcacggagacgctgtccgtccgcggcaggatgaacttgcgcagggtgacgatcacgtgacgcgcgccgaactccttcaggcaaacctttcccatgtcctccgccagcgtttccaccagcttgcggggtcgcgccatggcttccgccctcagggcgcgggcgatggaatcataacagacggtcctggaaaaatcgtcgttcaggccggagagggcttcatccggataaaaagtgatatccgccttcagggtctgcatggaggcgcgttcctcctccggcacgccgatgaaggtatccagctccaggccgttgatgttgatggaatcctgcgtatctgaaggcagggcatagcggcgcatcagcgtgcgcaggacaagcaggtccggaacgatgatgtccggcctggccttggaaagctgggcggcgtcattatagccggtcagcacggcgatggacgtgatgcccgcatggtgggccgtctctatgtcatgctgcatgtccccgatgaacgcggtttcatgggcatgcagcccgtgctgggccagcagggtgtggatatgggcgtccttatggcggatgcccgcgtgaatggcttcaaaatattccatcatgcccagctcccggcactggatgtcgaactccttggcgtccacgctggtgaggataaagcagcgcacgccgcgcgcgcggcagaactccaggaattcccgcgcgttcggcagcacctccaccggcgcgttggaaacgcggaaggcgtaccggaaatggtcttccagttcattcaaatccgcctggggcagcacgcgggcataatagtccggatagggaagctggaattccgcgcggaattcatccctgtccatgcagggttttccgtactgggaaaaaacgtaattggacgcgtccagcgtcagggccaggtcatccaccagggtgccggaccagtcgaaaatgagattcttgaacatgggaatgcgtatcgggaaaaactcagtccagggcgtaccgcatggcggccagcccgaagaaggcggccgtctccacccggaggacgatggggccaagcgtaacgggagagaatccggcctccagcgccatggccgtctcctggtccgtaaagtcgccctccggccccaccagcagggcagcactccgcacggagcgggagcgggcttcctccagcacgtccctgaccgggcgcacgccgggcaccagggaggcgatcacgttcagcccttccggcgctccgcggcgcagccattccgcaaagggaacgggagccgtaacctcgggaagcgtgttctggccgcactgcttgcaggcctccagggcgatgcgctgccacttctgcctcttggcctccgcctcccgcgcgttcaggcgcacgatcgtgcggtccgtcaggagcggaacgatggcggaaacgcccagttccacggatttctgaatgatgaggtccatgttggctcctttggggaccgcctggcacagcgtcagatgggccaattctggagcgggaggacattcctcccccggagccagcagcaccccggaactgcgcggaggttccgccaccacggcatgggcggcgcggccgcaaccgtcaaagacgacgcaggaatcaccctgtttcaggcgcagaaccttggcggcatggtgcgcctcatccccgcgcagctcccaggagggagcggcccattccgaagccgggaggtaaaagcgagccatgcgtgaaagggaaaaacggaccttacttgttcttcaggtagcgcgccgccttgtcggcaaacgccacgcaggccggctggttgcgcttctcatccaccgtggaggcaaaggcgttcagcttgtccatctggtccttggtgagctgggtggggatttccacctccacttccaccagcatgtcccctacgtccgaactgcggagggctttcatgcccttgccgcgcaggcggaagatcatgccgttctgcgtgccttccggcagcttgatggtggccgcgccttccagcgtgggaaccttcagcctgccgccggagacggccagggaaagcggaaccggaaccgtgcagctcaggtcgttgccttccctctggaaaatatcgtgaggttttacgtcaataaacacgtgcaggtccccggtggggccgccgtgcaccccggcatccccttccccggcgatgcggagctggctgcccgtggccacgcctgcgggaatgcggatggtgatgtgggaatcttccctcacgcgcccttccccgcggcaggcggggcacgggtccgagatgatttccccggtgccgtggcaggtggggcaggtggactgctggacgaaaaagccgctctgctgggtgatgatgccgcgcccctggcaggtgggacacgtcttgaacgcttcctttccatcccgggctccggtgccgtggcaggccttgcaggtcaccaggcgctcaatctccagcttcttggtgcagcccttcgcggcttcttccagcgtaatgtccaggtcatagcgcagatcggaaccgggcctcttggaggatctcttctggccgccgtggccaccgccgccgaacatgtccgcaaaaccgcccattccggaaaacatctgggcaaaaatatccatcgggtcctggaacccgcctccgccatagccgccgcccgcggcgggaccgccctgttcaaaggcggcatggccgaagcggtcgtaagcggcctttttgtccgcatcggaaagcacctcgtaggcctctcccagctccttgaacttctcttccgcggaaggatcgtccggattgcggtccgggtggtacttcaaggccagcttgcggtaggccttcttgatctcatcatcagtggcgtccttggaaacgcccaggatctcgtaataatctttcttagccatgtggcgtgaatgttaaaaaaacggtcaaacttgcggttcgggttccggagtctcggccaccacgacgtttgccgggcgcagaagcctgtccttcagcttgtatcccttgcggataacgcggagcacggtgccttcaggctggtcggagggttcgcgctggagggcttcctccgtggcgtggtcaaacatgctgcccactaccggttcaatggcgctcacgccattgctggaaaggaattcgtccaactgcttcttcaccatgctcatgccgatgtaaatcatggaggcggtgtccgcgctggccgccgccatgcccatttcaaaattatcaatcaccggcagcagttcttccagcaggcgctggttggcaaacttggcgcattcttccttttccttcaccatgcgcttgcggtaattgtcgtattccgcggcggtgcgcatggcggtatccctccatttaagcaattcctcttccagggaagcttccgctcctttttcctctgcgggggcgtcctgggcctgttccagaacttcctgctcttccgcttccgcgttcttctctttctcttcgttgctcatgcggacaatgtagatacttttaccgaatgcgtcaacggcctgctaagacatggatgacgtttgacgcgtgatgaccggaacatgatgcaactcatctatgcagaaaagggaatggcggctttccggccagcctccctaagcttccggaacgcctgccgcaggcagcagccgggcaagcttttccgcgcagccgtccggcagctccaccactttcagccgggctgactctccgcgcagcaggctgacggcggaccggggaacgtccagccacgcggacaggaacaggatgacggccctgttcgccttcccctccacgggaggcgcggcaatgcgcagcttcagcacgcgtccggcacggggatcgtcctcccagcccgcggcttcgctcttcttcgcgttgggaatgactttcagggccagcttcatgccttgcgcctttccgtcccggatttcccgctttgcctcgccaccaggtccgcgtacctgatgaggccgcccccgaacaggtccagagcgctccccgccgtggcgtccatcgcgccgccgctcagggcgtctatctcgtcaaaatcctgaatacggctgattccgccggcataggtcatgggcaggcggcgccagcttcccagcatctccaccagttcccggtcaatgcccgtgcaaaggccttccacgtccgccgcatggataaggaactccgcgcagtgctccgccagcatgtccagcgtctccgccgtcacctggagctccgtcaaggtctgccaccggttcatggccacggcccagccgcccggaaccctgcggcagctcaaatccagcaccaggcgttccgcgcccacggcggaaacaaggtccttgagcttcccctccagaaatttcccctccgcatcaaacaggcaggaggtgacgatcacatggctggctccggctgaaatccattcctccgcgttccccggcgttatgccgccgcctacctggaggccgcccggccacgccgccagggcttcccgcgccgcaaggtcgttgccgggtcccagcttgatcacgtggccgccgtgcaggccgtccctgcggtacaaatccgcataccatgccgcgccgcggtcggagacgaaattggtgcgcagggaagctccgtcctgcgtcagggaaccgcccacgatctgcttcacgcgcccgtcatgtaaatcaatgcatggtctgaatctcgtcacgcggccactttgcccgccccatccccgcaggtcaagaagggattaccctccggcgccgtccggaaaacgggcgcggaaaattacacaaaacagtcccgggcctccgctttaccggataaccgcccctgaacatcgttcaagaagccgatgaaaaacaacctcgtcaaaaacaacctcctttcctactgcgccgggagcgccctgtttgccctcctggccttcccaccttccgttgcggaagccggaatccatctgcacggtgaaatgcgcatggccccggaaggacaaggcagcctcctgtatgactcctccggattccctatctggggctattccgcatgcggccggcccatttacgcctattcccccgtaggcatgcccatctacgtcatcaggggcatctaccgcggctactacgttcccgcctggaatcccaggccgcattatcacggccccttctggcctgcgggcgtctgccgcggacgccatgccgcgcatccgcggtgcggaatgccagggccgccgcggctccactgccggccctgccgccccaggcctccctacggcgggccgccgtcccatttccaccgccggtaaaacaacacgcgccgcggaaatacggaacggaaaaaggccactcatggaataacgcgccttccggctacatcctttcctttattcagggaaggaaaggccgtaccacccttccccgagcagcttcaccagggtgaaggaatattcccccttgcggttgggctccttgctgcgggaaagcaggacgcgcacgcggagcatgtcaagctcgtcattagcgttcagcacccggtatggggaatgctccatttcctcattgattttaaacagcataaacagtcgcttgcccgtttccgattttctgggaacataaaccatgggccgcgcaatgctgcgctcctccgacccgttcattccgggagcgatcagcttgaacgcgtagttgtccttattctccgacatgcggtcccggatcatccacacgcggaattccgcgatgtcctccccttttccacggacaaaatcctcccagttcaccggctggtagcgggcgaactgctgccagtccagcttccaggcgccatcctgtccatccttgaaaaagcagaattccatgtcgggcgtcttttcaaagcctatcagcagctgggcgcagggatgcccctccacctcaagcacggcgaaacttttaggccccacgggcttgctggcaatcacctcaggcggagatacggcgtaatgcctgaccatcaaaggaagcgattgcagggaattccacacgaaggaggatttctggaccacgtccggagcgctcaaatatttctgcgcctccaccaggcaattgcgcagcaggtcctgccgctccatcgggggaatgtggcagggaggccagaaactgtagtccaccttgtccttcagcgtggcctgcaattccccggacagcatctccggcgtggcgcaaatccgcgcggcggcccctgaatcccgggatgcctggcgcttctggagccagaaaaaaaggccgccgaaaaacagccccagcgccatcatgaagaagatgacggacagaatgcgccccagcgcgccgcccgcttttccgccgctcctgcgcgcggcaggggaaaggggcggtttgttgtcagataaatcactcattttaaaccggaaatacccacagaaaacaactgcggaaggatggtcaaacactaccggaacgccaagggtaacgcaacgataaaaaacagacacatttttttatcccttccggagaaaattgtttcacatccacaagcgggtgatgtacattaaaccggacgagtttcaagaactcccaccttacctttcacccctccctctttttaacgccatgtttggatcattcaccaccgttcccgcccccaagggcaacaagaatcctgaatccacccccagctggatggacgtagccaagagccaggacacccccgaaccggttgcggaagccgtaccctcccccgcttcctacgcccccactacgcgcgtccagcaactgacccgcaacgtgctgaactccgacgtggaggttgtcggctccctgcgtttttccgacgacctgctgattgacggcaccgttgaaggcgacatttcttccgaaggggtgctctccgtaggccagaatgccgtcatccgcgcggaaatcaacaccaagtccgtcatcatccacggcaaggtcatcggcaatgtaacggttacggaccgcgtggaactgaaaagcaccgcggaactcgtaggcgacatccaggccgcctccctggctattgaaggcggcgcgatcttcatcggccattccaccgtaggcgcccctacggtaggcaccgccggagcctccgccgcgaagaaagcggcccccgttcataccttcactccggaaccggaagcccccgccccgaccagccagagcacgctggacattgacgcggaataagaaaaaccttctaccagccattttcaggggcgtcaaaggaacggatcgttcttttgccgccctctttgttccatgactccctccttccatcccgttccacggaccagcagcgcgccttccgggaaaatcaggcgtcccgctccggccccgccctggacgctcccggcagccgcggaaagcaggcctgcgcccacccgggaggtggaatgcttctcctgccgcaaaaacacttccgttcccgtcacggccgtttccgccagatgcgggcactgctccgcctacatcaagctggacgacgtcatcctgcacagcaggacgcacagaacgaaggtgcagacctgcggaagcgtcaccgtgcaggccaatgcagacctaaagggactgaacatcgaatgccgggacctggtcttatacggcagggcgtccggcgattttctgtgccggggcgtctgcaagatcaaaacggaccagcacatctccggctccatctccgcccgcaggctggtggtggaaaaaaagacgacggtgctggtcacaggagtcatccaggtggaaaacatctggatacagggttccctggaaggaacgctcacggcggatgaaaccgttaccatccaccggcacgccaaattcctgggggacatcacggcgcgccgcctcatcattgaggaagggggggcgcaccagggctcctttatccggcttacgtgacatgaaccttcccatctccatccgcggcgcacgccagcacaacctccggaacctggacctggaccttccgtccaacaagctgatcgtgttcagcggcccttccggctccggaaaatcctccctggcgttcgacacgcttttctccgaatcccgcaggcgtttcctggattgtctttcggcacgggccaggcagggcatggaacagccggaaaagccggaggtggacagcatcaccggactgcccccggccctgtgcctggaacaatccgccaggcagcagagttctcgcaccctgctggggagcatcacggaaattctggactacctgcgcatcctgtatgcggctgccggcactccccataacccggaaacgggcaaggaactggtgcgcaaaagcccggaccagattacggaggaactcgtctccctgccggaacagacgcgcctggtcctggccgctccggcggaagccctgctggcccaggatcctgcggcgactctgggcgacttccagcgccagggctttctgcgggtctattggaacggggaaatgcaggatattgaggaaataggctccccggctcctcccccgccggatgccgccctggtcatcgaccgcatcatcgtccgcggggaaaacacggcctcccgcctggcggactccctccaaacggccctccggatcaatccggacgaggtgcgggccatcatcaccaggccgggggaagaaactaccgtccaggccttccatacccgctaccgcaacccggaaacgggcttcctgcttccccagcttacgccccgccatttctccttcaactctccactgggcgcgtgcccttcctgccagggctccggcctgaatgagcgggaaaaaggcccatgctccgcctgcggcggcctgcggctctcccccctggcgctggccgtcaccatgcacacgccggaccgcgcctataacctggcggaactgacggctctaccgctggaagacatggccggagagctggaacggctgaagacgcccgcctccctggcggcggcgctggacccgctcatgaaggagatcaacaagcgcgtgcgcttcctgaacgaactgggcctttcctacctctccctggaccggcaggcaaacactctttccggcggggaactgcaaagggcgcgcctggcctcccagctgggcggcggtctttccggggtcctttacatcctggacgaacctactgccggacttcaccccgccgatacggaccgcctgctccgcgcgctccggacgctccgggaccagggcaacacggtcctggtagtggagcacgacgaacaaattctgaacgcggcggaccatctggtggacatgggccccggctccggcacccacggcggccgtattctggcgcaaggtccccttccggaaattctggaaaacgccgagagccctaccggagcatggctctccggcaaacggagcatgcccgcctccggacacaggacggttcccaccgggcatctggtcctggccggggcggacaagcacaacctcaacaacgtcaccctgaacatcccggtaggcacgctgacctgcatctccgggccctccggttccggaaaatccactcttgtccgggactgcctcattcccgcggtcaggcaggacatccccgggaaaaagggcgttccgcgccgcgtgcagggctcggaacacttcaaccgcctcgtcgtcatcgaccagtcgcccatcggcaggacgccgcgctccacgccggccacagccaccggactgctccaggtcctgcgccccctttacgcccagctccctctttccaagcaaaggggatacacggcggcgcgcttttcccccaacatccgcggggggcgctgcgaacggtgcctgggcacgggcatgattgaagtggacatgaactttctgggcaacgtcacgatgccctgcaacgcctgccagggccagtgctacaaccgggaaacgctggaagtcacctggaagggaaaatccatcgcccaggcgctggcgctgacggtggatgaagcggcggaattcttctcctccctgccccgggccaccgccatcctgaaaagcatgcaggacgtgggcctgggatacctcagcctcaaccgccgggcagacaccctctccggcggggaatcccagcgcatcaaaatagccgcggagctggccaaggccccggcctggaaactggcggaggacggcaagcgcgccctcttcattctggacgaacctaccagcggcctccacttcaatgaagtggcccttcttctgacagctcttttccgtctgagggacgccgggcacaccatcctctgcgtggaacaccacaaggacctgctgaacgccgcggactacctggtggatatgggccccggagccggaagacatggcggaaacatcgtggcggaaggaacgcccgccgccgtagcagccatgccggaagcgcccacggcgccgtggcttctcgcccgttaaggaagaataattattattatcttgacgtttttcaggcttttatctagcaatatgggaattcctctctgcttttccgatgaatccccgttccttttccctagcgctgctggcgctgtttcttcttcctgaaacactccatgccacgcccgtattccttgaaaacgtctccgaatccggcggatggtatgactgcaacaagaaaaccaaatggaagtggggcagcggttccatgacagaccgtccttccggctactacagcctggacaatcccgtagacagccagctctgctgggcagcggcggccttcaacgttcttcaatggtggcagaataccagaagcgacctctcacctacgacccccaacggaaaatcctccacttacggcaacatgccggaagcctgccagctgcgcatttaccagaccatggcgacgagctggactgacaagggagggtccgtggaacaggcttacaactggtggttcaacggaggaatgcttccctccgccttttatgggaccgactccacgatcagggacaacccctcctccgaaggaggctactggaaagagctgaacctgaccgtgacctacgacaagtggggagcgccggacaacactccgctattcaattcctacactttctgggagggcgataccagggacggaatctacagcgttttgaaaaacagcatcaacaacaactggggaaccacgctcagcatcggccagtacggaaccggccacgccatcaccatgtggggctatgatatggacgcggacgggaacctgattatctacctgacggattccgatgactatgcattgggaatgttccggcagaaagtcatcgtggacgatgagaaacacatctatctgaccagcgtggacggtgaaaacaacgtgtacggctataattacgatgaagcagccctgaccggcacccggctgggcgaacttcaaagcttcaccgccccgctgggagacctcaggattccggaacccggcactggaattctttccctctgcggcgtattccttaccgtgtcccgacgcaggcgcatcctgcggtaaggccttccgaactcccttctctctcaaaaacgggtcttgattcttgccggggaaatgtgcagaatcgggaaacgcataagttcagaagagcatgaattgttccaatgttctccagtgcggttacctgtgaaatgaatgacgcttccaacaaccacggcgagctggaaagcaccgtctcgacctattccgtcgacatagaaacccttcagcagatagccctgaaaggagacgcccaggcactgttccaactggcgatcagttatgaacaggggcgcggggtagcggaaaaccagcaggaagccttctactgctaccagcaggcggcggaactgggccacgtgacagcccagctcaaccttggctgggcctactccaacggcataggcgccccgcaggacaatgacaaagccttttactggtaccgaaaagccgccgagcaaggccatcccaccgcgcaattcgacctcggattctgctatatcaacgggctgggcgtggaaaaagacgaaaaccaggccatcacctggtacaaaaaagcggcggaacaaggtcacgcggtagcccagctcaacctcggctggatttacgccaacagcgccagccagaaaaactgggaacaggccgtgtactggtacaagcaggccgcggaacagggggatccccgtgcccagtacaacctggcctggtgctacggcaatggaagcggcactccccggaatccgcaaaaagccgcctactggtatgaggaggccgccatgcagaaccacgctacggcccagtataacctgggctggtgttatgaaaacggtttcggcgtgcagccgaatatcgacaaggcgctggtatggtaccacaaatcagccctccagggccagatcacggcccaatacacgctgggctggtgctacggcaacggccggggcatggaagtggacatggccaaagccgtccactggtacaccaaggccgccgaacagggccatacaacggcccagctcaacctggggtggtgccacctgaacggcaagggaacgcccgtcaaccgggaggaagccttgaaatggtatctcaaggcggcggaacagggcaatgccacagccatgttcaatgtgggcaactgctacgcccacggctacggcattccgcaggatgacgaacaggcggcggaatggtaccagaaagccgtcaggcacggcaacaaaaaggccgccagcgccctgcgccacctggcctccaagcaggaaaaagagaaaaaaccggatgcggaggcctgaaaaaacgcttcttctttttacaagaatcggagaatcccttttcgcagcgcagcagccatcaaaaaaacgcagggaaaaaacatatccccatggcttaaagaaaaaacgtccgcctgggattgaaggcccccggccttcatcaagaagccgccgcattccatcaccgccgccccttcctcccaccgcccgccgggcctttccgggacaacctttccaccgcctccggcagccgtgttgcgccatcgccgcccagcacgacgtcaatatcctcgagagcgcgaatcagatcgatcacttcccgccggggcaaggccccacccgcagacatgcagaaatgagtgcggcacgccagcggccttccctggtaaatcatgcacttcccctgcccgttcagaaatgggcagcttccgtccggcggcagctccacgcgcatgcgtccggcggcgcgccacgccttccaggccatccacgcctcccccagcgtcacatgcggcgtctctcctgtcagccggaaccggcagcagtccgccacacccgtgcaggaacgctgcgcccgggaagcccggagagcgccttcatccagaaggcgccgtacttccatcagcatttcagcggagggaacagctccctccgctcttccatgacggcacttccccggcgccatgactgcggcggttaatgcgtcaggccgtcggccttcgcctggttccaatacgcgtactcggaacggttgaagtccacatactccggagacaaatccgtggtgtacaccgtatgggaaaactcgccccggttcaaattgatatccacctggaatgcggaaacctgcacggcctgccgcaaatcgtccgacggagtatccgcctgcatgccgccgcggcaggcggccaatccggcgatgtcgatgtcgatcttctcttcatccaccttcgcgccgcaatagcccacggcatggataatgcgcccccagttgggatcgttcccgttccaggaactcttcaccagggatgacttggcgacggcttccgccgccttcttcgcttcatcctccgtacggcctccggtcacatgcacggtcacaaacttggtcacgcgttcgccgtcctgcacgatatgcttggccagctccagcatcacatgggccagagcctgctggaacgcgtaaatatcttccggggattccagcttcacgccggaagcgccgttcgccatcaccagcaccgtgtcgttcgtgctcatgtcgccgtcgatggtgatgcaattgaaggaacttttcacgccggactgcacgcacagctccagcacgtcgcgggaaatgcccgcgtccgtcgtaataaagcacagcatggtagccatgcagggattgatcatgcccgcgcccttgcagcatgcgccgatgcgcacgggcctgccctgcaccatgaactcaatggcaatgatcttctccttcgtatcgctggtcatcacggcctgggccacctcgtgccccttgtcgcgggaaaggccttccgccaattccgggaacttcgggtaaatgcgcatcatgggcatcggcaggccgatcacgccggtggagcacacggccacttccgcaggtttcagccccagaagttccgcaacgctcctgcactcgcccctggcgtcttccacgccctgggctccggtacacgcgttcgcattcccgctgttcgccacgatggcgcggatattccccttccggaggtgctcccggctcaccttcacgcaggcggcctgcactcggttggtcgtgaacgtgcctgcggaaacgcagggttccgtggaataaatcagggccaggtccaggcgcgtggccgtaggcttcttgatgccgcagcttacggcgctccccacaaagccctggggcgcgcaaacgcccccgtcaaccggaatataggatgaatcattcatcgtcttgaagtgccttccagcgtatcaaaaaactacaggacccacaagccttccgtttcatcgaacccgcacatgatattgaaggactggacggcctggccgcccgcgcctttcaccacattatcctccgcgctcatcagaatcacgcggttcgtccggggatcataggcccagccgatgtccacgcaattcgtccgcgtcacattcttggtatccgcaggctggttgcggcccagaaggcgcacgaacggagccgccgcataagcttcttccaacaggcggccgacggactcgggatccgctcccttcttcaccctggccgtaatggtggagcaaatgcccgtattcacgggaatcaggtgcggggtgaaggacatcaccaccgtcttcccggcggcatgggaaagctcctgctcaatctcgctcaaatggcggtgcttcggcacgccgtaggcatggaaactctcattgcactcgcagaacagcaggggaatggacgccttgcgccccgcgccgctcacgccgctgccggagcagaccacgacgtcctccggctccagaatgccggccttgaacaggggaatcaggggaagaaggatgctggtgggatagcagccgggggaagctacgatgcgcgcccgggcaatctcctccctgcgccactccggcaggccatacacggcctcctgcatcagggccgtatccggatgggcgttgccgtaatactcctcgtacacttccgggctgtccaggcggaaatccgcgctcaggtcaatcacgcgcacgccgcggtccaccaggccgcgggcataggaagcggccacaccatgcggcagcgccaggaaagccacctccgcgcccgtggcggcaatcgcgtccacatcggaatccgtaaacttcaggtcggaacccggaacctgccggaaacggggaaacacctcccacaacggctgtccggcatactggcgggaggtagcgcacaccagcttcactccgcggtgattcaacaggatgcgcaacaactcctgtccggtgtagccactggccccgacgactgcaacttgaacttgcttcatgacaaaaaaggtatgctatgaaaaaagactcttgccaacactaaagttttcctatatacacctcgccgtcgcaagacacggccccggtcggtccgattttatcgggttgtagcgcagtctggtagcgcacctgcatggggtgcagggggtcgcaggttcgaatcctgtcaacccgaccacttttaaccgctgtaagttgaaaagcttacggcggtttttcattttccggcatattgaaataattgccgtccgcctgcctctcaacatcatggggatgtgggtctttctatccatgaacccgcgtcaatgcggaaaaattaggaaaaggaaaaaaggacgtggaatcgttgtattctgcccatttggcgtttccgcctgacgttgcatgcgggatgacttctttttgaaatacatgcaaattcctttcgcaaggtgtctgtcctgaaacaggttcccgagtaatcaggagatatgtatccaaggaaaaacaggatgttcaccagccggggttatcccgaaccaattagacaacaatcatgaatgagattatcacgattaacggaatcctgatgaccacgcagaatgaattttccgctcatgcaggaaacgcaagcattcacgtcacggcacaggaaaaggaaaaatggaactcaggcggtcaaggacctaaaggagacaagggcgatccgggagccccgggaccggaaggcccccaaggccccaagggtgaacccggcatccagggccctgccggtccacagggccccaaaggggacaagggagataaaggggatgcaggtcccgaaggtccgcaaggttccagcgtgcctcctggctgcttcatgtggttctgcggcagcgtagcgccggcgggctggctggaatgcaatgggacaattctccaaatcagtcagtatccggaattgtacgcggcaatcagcaccacctatggcggcgacggcgtaactaccttcgcccttcccgacttgacaaaagacagcgggctgttcatccgttccacttctacagagagaactgtaggtagcgtgcaaggggatgctatccgcaatattacagggaaactgcaaacaaatatttcaattggcccatcagggggaactggcgtgttttcaaaaatgacaggtaaaaatcaaacatacggaggacatacacaatatacggacagatttaccagcactctgatttttgacgcctccgactctgttccgacggccgacgaaaaccgccctgtcaatatggctttgatacccattatcaagtactagactatatctattaataaaaacattacagttggttgaatctcacgcctgttttatcttttacccaaaggaatatttgaacgcttcagcgtcaaaaccagtggcagcaaccatctccaaccgccgcgagtatcctgctttcggcggtttttctttccatttaagggacgaatagagcctttctttactcagaagctgtatttcaccatcatgtaatgaaacgaattacatttgcatccatccttcttctgaaaaaagaatattcttaatatttgatgaaaaacattttttacactgttggctccggtagtctcctgctataaaccacctgttgctgaacaaaagataggctgacatcgtaaaatgtccggacatctgttctcatgaaaaaccccacctcactggtataaaagataatgcgtatgaaaaaaatcctgtcgtttctgtctattttactggtcccttttttccctgcacaggcggccaatgttcctattgacagcattccctttgagctgggcactgccagccgcatttacgtgaaggggagcgtcaatggcagccgtcccctgcgttttctttttgataccggagccacatccatggtcatcagcaccaattccctgaaaggcgttcccatggaattcaacgagaccgtcgtcaaccatggcgccacagggtccgatgaagtacgcgcgagcacggagaacaaattcaccatcggaggacgaagcctggagcacgttccctttattgccattccctattcaccggaccagtgggacggcgtgctgggcctctggttcatccaacggcaggtaacggaagtgaattacacggaccggaagatttacctgtacccgcacggttcctatacgccgccggcgaatgccatccgcctgaagattgagtacgtgatgggcgttccgattgtccccgcacaagtgacggtcaacgggaaaacctaccagctccgtttatccgtggataccggctctgaccgtgtcctggacctcaatacgcctttcgtcaaaaaacatcatttgctgggcagccaaaagccgttttccctttcccgcatttccagttcggattcccataccggggttctggaaaacgtcatgttcgacagcatccaactgggcggctgcaagctccccctcatccccggcgccttctccaccgtcaccagcggtattcagagcatcgcggaaatggacggcgtcatgggcaacaacctgctaaaacggttcaacatggtctatgattcccgggaagggtatatttacctgattcccaacaatctgctttacaccccgttttacgactgtctgctccgtccgcagccggccccggccctttcccccgggaagtaaggcgttccgtcaacgctccaccctaccgggcacttccgcgcaggttgatgatgcgggtgcagaggtccaccagcttcgttcccagccgggaatgcaggacccggtagatgccgaagagggcgcaccgaacgcggaagtcgttccctttcgcaatgtgtctcaacaggcggaagggggattccggggatttgacgaactcacgccattcatatttgtccagtagcgtccggacggcgtccagagcctcctttttttctgccgccgtctggttcaacaggttggaggaaaagagctggatgctgccgttcagccagttcagcaccgtaatcccggctctttccagcacgccctgttcccggtaggccgccgcaatcaggtcaatgcgttccagagccggataaaagccggaaccctttttgtccggggccttgtacacgttcaccagggagtccgggcgggtaggacggtagatgtacaggcagtccggtattttcacgattcttttcacatagggctggagcaggttgttgaagagggcgtcgctcccctgccgcatccccgccctgaagcgcagacccgtctttttcaggaattccgcccggtacagcttgtcccagcacagttcgctgaacggccccatcgtcgtgaagtcatagttaccgcaatgccattccgggcattgcaggccgttgagcatgctccagcggacggagaggggcatgtcccccgcaatcgtcgcccccatgcacgccacgtccgcccggtattcctccgccgccagatacaggcgctggaacatgacgggggaaatgtagtcgtccgggtccacaaagccgatgtattccccggaagccgcatccagcccggcgttccgcgccgccgccacgcccgcattcggctggtcgatgacgacgaaccgttcatccgcggcttcatattccctcaggatgtccagggttccatccccggagccgtcgttgatgcagatgatttgaatgtcccggagcgtctgggagcagacggtatccaggcattttttcatgaagggggctacgttgtagcagggaatgatgatggaaacgagcggcatgtttttatgaaaataaaggttagcgtgatgaagaagagtttaattgacggaagaggtccatccacgcggcgcagacgggatccatcgcataacgggccgccttgttccgggcggcttcccccaggcggctccttagctccggctgttccatcagccggatgatggcgcgggccagggcgtccgtatccccggggggaaccagcaagccgtcttcttccggggaaatgacgtcccgcggaccgcacgggcattcaaaagccacgcacggcacgccgcacgccatggcttccaccagcaccatgccgaagccttcaaagagggaggggaataccagcatggaggattgaagcagtttttcctgcacctcccctgtggctccgcgcagcagcacgtttttttccagcccttttccccggaccaggcgttcaagagaaccgcgctccggaccgtccccccaaatttccagtttccagtccggatgaacggcggccactttttcccacgcgcgtaccagcaggccgaatcccttcaccggaaccagccgcccaacggccacagcccgcggacgttccaggggagcaacccgctccggccgccatacgcacggattggggatgacatgcactccccgcctgcccttccagttttcttcccggtcctgccgggtgagaacgacggtagcgtcataggttcccctgcggaggccgaattcatagaagtcggaaagagcagccattacgcgcgcacggattcccccctgaagccgcgcatagtccttccggtacgttccggagtagtggaattcgcgcacggttttccacggcttgtcgcgcgacaggcgcggtatcatgaatttttccgactgcccgacggagacgactatatccggacggagttcatccagcgccttccgcagagctttcgcatgcctcctgcgccggaccagaatgcccttcagcacatacaggaatcccttccagtcgtcctcatagtagttcacacccaggtgaaccaccttcacgcccggagggagggaggaagcggtccgccgggaatcattggccgtcaccagcattatttcattgccggggatggcagccagggcggcagccttggcgcgggtcacggcctgaatgccgcccgccgcgtccagatcatccagtacataggctattttcatttccgttattcctttcttccgtttttggccagaatgagtcctgtcaggaccactccgaacggcagggccgccagagtcagcaacggtcgcggtgattcccgcaaaaaacccggattgcgggccagcagggaggcggagacgtaatgaaccgcctccatgaaccgccgacgccgggagggctggtatttcattccctccttccgcagaaaggcgaatccccgcgggttgagcacgtattggcggaacatgttcctggaggagccgtcctcccggtattccaccaggcaaagcaccttgttcatcgtaagcagcggggcgacgcggtccgccagcatgtacttgtagcccagccccacgtatttttcaccgggaaagacgggatacggcggcaattgcttcatcagcgcggtgcggtacaccagcttcttgtctccgcggcctcccgccgcataaaacccggtcaatgtggtttcctgcacatcccctgcaaaggccgtgccgatgagttcccccgtcttcacgtccgcatccagccctgccagtccggccacacggtcacttccgtgacgttcccagaatcccagaatggaggccacggcgtcttccggcatcaggtcgtcggaatccaggcagacattgagttccgtgtccatcaattcatacgcggcattgtgggcggcatgcatgcctccgttttcctgatggtggcagcgtatgtccagcgcgccttcccgcatccattccttcaccagttccttcgtgccgtcggtggagccgtcgtccaccaccagccagataaaatcacggcaggtctgccgccgcaggctttcatagcagtggcgcaggcagtccgccctgttgaaggagggcgtgaagacggtgagcaggggtttcatgcttcacctccctgtgacagatagagttcctgaagcttttccgcattgcggacgatgtccagccccgcttcacggatgaaggcggacgcatccgtccgttgccagccgtccgccagttccgctattttccgcgcccaggcggcgggggattttttcagggacataaaattcacatggcccgggaccaccgctccatcccccggcacctggtcggacgccaccacgggcagccccgccgcctgcgcttccagcatcgcaatgccgaagccttcaaaccgggaggggaagacaaagacatccatcccctgcaccagggcggcaacgtcatccctgccgcccagcaggcggatgcttccgtcccattcaggccgctccgcctcctgccggatcctgccctctccttccccgccgcttcccaccagcgccagcagggcgtccggccttaccgccagcagggcgcggaagacgcgcagcaggaattcgtggtttttgggccaggaaaaattgccgatgtggcccactaccagcctgccttcccagcccatttccttccgcacccgctcccggacctccggggaataggtgaaccgccccgcgtcaatggcgttccggacgacgatggcgtcacgcgcgcccctgcggccgaaaagccagcgcccgcacagttcgttacatgtgaaccggtgggtcaggcagggacgcatcaggtgcttgagcacgaagcggaacagggagtttttatcaattcctaccggagagctgtgggcatgcgccgcaatgaaaggaatgttccgcgccgccgcctcacgatatacccagtagcccagctcggaacagtggccgtgaaccatcctgtattccggatgtccgtcaaaaaaagccgctattttttcctgatacgccgccagaccgcgcagggtgatgggcggcagcctgtaaatccgccctcccagcctccggatttcctcttcataaatgccgggcgtctcccggtgcaccagaaagtcaaactggagcttgccgcggtccatgcggcggtaatagttcatcaccatcgtttccgctccgccgcggttcatgatggtgaataccatgagcactcgttgaggggtcattttgccagaatttttttaatggtcagaagaagcaggtacaaaccggggacgaaccccagcttcacggtcaggaaaaacgctttccagtggggagggagagatgctgtgggtagtcctttcaccgcctcccggcaccaatcccgtttcagcagttcatggagaatacggcatttccggaaggaggaggccggagcgtcgcagacgttcaagcccaggaaaatgacggagagcgccatgcggttccgcagggcctgctccgcttccggataagctccgctttcccgcacctgccgctccatccggcggaagagttcctcccactggtccgccagctccggcttgtaccgcttggtcagggctcccgccgccgtcttccggtaatggtagaaggtggtggggatgtacaccgccctgcgggccgcccggaacagggaaagattgcagagcacgtcttccgcggagccgatcagggccgtgtccacgaaggaggcttccccttcccggaacagggaacgcctgtagagcttgccccaggccgtaccgtaggagtccagccgttccggacgccccagttcagccccggacggccccaggagccggttcctcagccattccatggattccccttcaaacacccgctcctcgcgccagaacagcaccggggcggacgtcgttccatattccctggcatagctccagaacacgatgtccgcgtcccttcccagcatggcttccatcgcgtccgcgcacgcgtgttcgtccagccagtcgtccgcgtccacaaacatcacgtattccccttccgccagctccagcccggcattccgggaggcggacaagccggagttttcccggcaagccacctgtacccggccatcccggcggcgcagttcttccagcatgtccccactggagtccgtggaaccgtcattcacgcagatgacctgaatatcccggtacgtctggttcagaatgctttccatgcagcgggaaagataagcctccgcgttatagacgggaacgatgacggaaatcacggcttgccccctttcctttcctgaaggatgcggcggaacaggccgtcccattgggccgccaccgtttcagccgcgtaccgcttcacattttcccgcgctttcgcggccatggaggagcgcagtttttcattccccatcagaagttccagggcggaagccagttccgccacctttcccggccgcgccagaaggccgtcctccccatggcggatgatgtcgccggggccgcaggggcagtcaaaggccacgcacggcacgccgcacgccatggcctcagccagcatcatgccgaagccttcataccgggaagacatggcgcagatggaagaccgcagatattcccgcatgatcctccgggtgggcggatgcagcagaaaactttcttccagcccttcccggcgtatttcctccctcagctttccaccatcccgctccgctccgaacagctccagcttccattccggaaatttaccgtgcgcctttttccaggcggccagaagcgctccgtagtttttctggggggaaaccttgccgacggcaatcacccttttttcttttccggaagagggtgcctccggataaaacggcaggggattgggaatcacctccacattcgccatgggccattcctcccggttgccgggcgtcagcaccacaaaacgggagaagcgttttcccaggaaccgcatcagggcgaattccagtttcatgagagcggaagatttcaggccgtccgcctgaatcagccgggaaacgtggcgttcatagaccacggggcagccgcagcccgtcagcaggaagggaatccagaaccccttgaagccgtcgtcgcaaacggaaacgacagcaggcttgacggcgcgcaccgccttccgaacgccgcttgcccaggccttcagcctcgcggcgggatttccctgcatgcgcacgtcatggacgtgaatgccgggccagaagtcataaaaaggctcctttccttcttcattcagcgtcaggatatggatttcatccccgtaccgttccgccagcaggcgcgtccggacggagagcacccgttccagccctcccgctccggcgatgccgttggtgatgtataaaagccgtcttcccatgtcagatcaatgcctccagtttcaggatttcattacggttgccgtagtcacgcctccggcattccgcagacaggctttccaggcgcgcgtcatccttcagcagccggaacagggccagcgcggcgccttcctcgtcattcgggatgatgactccgtccacgccgtcttccagatgcccggcagaggtcggaaagtttgtaatggctacgggccgtcccaatatctgcgcctccctcaccgccacggcccttccctcataccgggacggctgcacatacagcccgcaggcggccatgtacgggtaggggttggcctttttacccagaatgaccacgtgttctcgcatgccgcaggcggcaatttcacggcgcagggacatttcatccccgtagccgatgaggtaccagcgcagtttttccatccccattgccaccaggcgcgcggccagcctgacggcgcggtccatccccttggcatgggagaaccttcccacggtgcacagggacggggccccctccatcacggcggaaacgtcttccagagcggcctgttccctcaccgcttccggggaaacgatgttctgcatctccaccagcttatcctccagttccggaaagcgggacaggaagcccctcccggcctggggggaaatggagatgatgcggtcatagctgcgccacaccggcaattcacgctccacattgattccgatggaggagtagtccgtatgaatccaggctattttcctgcgggccagcaccttgtcccggacgatgcggtggggcgtcaggaagctgatggccaagtcatacacgcccagctttttcagggaaggaagaaacggggagacggcggcggcggcatcgtcaaagacggcgtagttttcacggccttccagccgttttccaaaacgggcggaacgccgcttggcccacaggcgcgcggcggcaatgcccagcctcccttccttcaggatgtcctttaccggacgggacagcgcacggtaggagggaagttccggcagaaggttcactttatccggaatcagcggcatcagctctccggaatggcggtaaacaaacaggtccacgcggaagcgggaggcgtccagcgcatccagcagccccagcagagcgcgttccgcgccccccagctccatgtattgaatggctatgaatatacgtttcatctgcatgccagcgtgcgcatgtggcccatcagcccgcggaagggggacgtcctgaacagcacgagtacgtccagccccagcggaatgactacggaaataatgccccacatgaacaggtccgccaggggggaggaaaaataggaacgggcgcagaggggatacgtcagcgcatatcccgccgccgccagcagcaggtaccatccgtacgtgatgaagtaccgcctcaggggctggtggaatacatgcctgtacaccagccgggggaattgccagacgcctatggagagaaggctgagcgtcgcggccagcagcacgcccgtaatcccccaccactgcaccagcgtgacggaaagcgcgacgttgatcacgccctggagaagcggggagtaccggtcctggtggaagatgcccgccttggtcttgaacaccatggcggaacgcctcatgcccaccacgaagaagttcaggatgatgacgaacgagcaggccccggagagcatgtattcaggccccagccaccagacgatgaagggattcagcgtgttcagcagaacgatggaggacacccctgaaatcaggaagttaatcaggaaaaccctcttgaaaatctcgtacacatgccctctgtcctcactggcgatcaggttgcccacgctttccgccatgctgttgatcacctgcatgatgaaggtggagatggttcccaccaccagcatgtagttggaatagaagcccaccgccgccagccccacgaagctggagatgacgatgttgctggtggagtgcatgaagtagccgcccacgctatgcaggaacagggccttgacgttgacgacgatctggcttttcgtcacggcgtccagggcatgggagaccctgctcctgacgtaggggtacagggcatccaccttgcgcaccatcgccacgttgaaccccgccaggaacagggattccaccaccaggtacaggacgtagttgcccgtccagtacaggatggccagcttggacaggttcagccccacctggtagatgaagttgatggcgcccagcctgtaatttttctggtccgcgttgatgagggaattcttgtacgccgtcaggtacggcaggatggagttgaagacgaagatgaaataaaccagcgccaggtagtccagatgcccctcgtccttgatgaagcagccaaggaacggatacaggcacaggcacagcacaaacacggcggcggcaatgatgcggtacaccttgcggtaaaattgcagcagggccagaatccgcggccggtcattctccgccagaggcttgtagaggtgaaaaaccacgcttgtcccgaagccggattccagcagcgtcaccgccgccaggatgttggtcagcaggccgttgaggcccaggtactccacccctatttcattgacaaacagcttgcgcgtcacaaagcccagcagggtcatcgtgaccatcaggctgatggtcaccagaaagttcttgccggagttcagcgttctcacgccttcccctcctccccgtttagttccacgctcagccgcagggccattccctgggcgaacggcatcaggctccacacgtcggaatacatgccgatgcccttggtatccccctggcacatgtccagcacgccgttgcggcgcgtcacccccatcagcgccttttccgcacggaaggcggctttcagaaaacgctcctctccggaaatgcggtaggcggccagcagcagaaggcccagcagggccgttccggaagattcaaacacggattccggcctggcgaccatccagccgaagccgccgtttttcttttgcaggggcagcagttcctccgccagcgccagaatgcgccgggccattccagccgcctccggcctcccgtgccgagccatcaggcggtaaagctcacacaatcccagcgcataccagcccaggccgcgggaccagtcatgcagccccagcggataaccgcgctccatctcaaacccgtgggccgggaaggaggagcccggcagcagggccacatcatattcctccacctgcttcaccgccaggttccagtattcttccttccccgtatgcaccgcgcaggcggcggccagcggacacgtcaggccgatggtatccacataacgcatgccgggctgcctgcgcctgtaggccagcgttcccgcccccgtccgcagggattccagcaatgcggcggaagcctccgccacctggtccgccccgcggcatccggcctccagcacggcataatccagcagcagccggtccacctcccaccgttccgggtatggaacgtccagataatttttcaccagttcatgttcttccagactgcggcgcagcttttccttcaatgcctcatccttcctgtccgcggcataggcgtgcagacccaggaacaacccagccgcctgccacccctgaatggcggcgtccgcgtaggttccccgcgccatctcccacaggatgcgcctgccctggtccctcctgggcacggcgggcatgcgccgcgtccatgaggaggccgtccgggccagagcctcctgccacgcgcgccggtcctgccagcgcccgatatggaaacgccccgccagcgtccccaggaatcgccaggcgtccacgcaaaccacggccagaaccagcaggagcaggacggacaagatggaaacgtacgcaatcatgaccgcttcaacagggttgaaagttcttccggcagacgcgccaggcgttcccggtacgcggggattttttccgcataggcggccttcaggccgtcttccctttccatcatccggacaaacgccttcctcaactcgccagggtcatccatcgcctgcacgggcagcacgtggccgtcttccgtcccgaacaaatcgcgggcaatccccctggccttcacggaatatcccgccaccagcgtgggaacgcccgtggaataggcggcaatggaggcgtgggtacgggcggccaccaggaaacggcaccgggaaatgcagcccttcaattcctcacagggggcgtccccaaccataatgacgcgccccgtgtgccggaaacgctcccgcaacgcgcccagcggcttccggtcatcgttgccgggccacaccacatgggggatgagggccacattcatatccgtagcttccagcaggtattccaccagccgcacatagttttccatcacggacccggcccttccctcatggccgataatcagggggctgacgttgatgccgaccatgttcccttccttccagccctccggcaaaggcccctccttcaccggaagggcaaacgccgggtccgggtacagcaccgtgcggaggcacccgcattccaacagggcgtcgcaggtcagggtttccctcgccacaatcaggtcaaaggcccggaggtcctccagcatccgccccttcatatccttccgttccagggaacacccccacaggacggtgggcacgccggcgcggcgcagcaggtcgttctgcaaataaatatgcacgggctccccgtagcagtaattgtccccgccgctgcacagggccaggtccgcaccctccttcacgatgccgccgaacgcgagccggtcaaaggcgtcacggacgcccagcacgcgccgccgcagccacgcgcccgcatacccggaggagcacctccggatgggccgctgttccggcagcaccctcaccacttgttccagcccataacgcctgtcttccccgcacgcggaggagaatagaacaccctgtccgggacggagcagcagcatcgtggacctgacaatcgcctcgcagccgtgattgccgctgcctccatggggatataaaagaatcttatgcatgcccattcgatttattttttccggcgcgcgcgccttccatcagcaggaacaggcagaagggccagcggttgaataaacacatgctcatccacccgggacagtggaacaccccgggataagcgcgcagcaggttgttttccggcgttcccacaatggttctcaccgccttcatgcgctccgccaggccgtaccggtccctgaaacggtagatttcaaacagggcgttgtacaccagcccccaccagcggaaggccaggtattcctcgattgacgccccttccagccccctggtatggaagtacttccgctccaggcggaactgcctgacaatccagatgaatttttccgggacaaaacgcgtggacagggtgccttcctccgcccggcgatagaagtatccggccttgtccaccgttctcaaacgcctgatgtatttcaggtacgccatgttgaacatcaggtcctctccataggaaacgtcctccggaaagcgtatggaatgccgggacagcagggtgcggcggtacaatttcaccaccgggccaaaaagcaggaaggaacggaacagccgtacccaggcttcctcctctccgggcctggcgtccagttccatgggctgcggcaccgtcacttcatcctttttcccggcgcggacggagcacagcccttccaccaccaggtcgcaggcgccgtcctccacggcggagaccagttcctgaaggtaggagggggtcacccagtcatccccgtcaatgaaacacagccagcggccgtccgtttccttcatgccgcggttcctggcggcggaaacccccatgttcctgtccagatggatgacccggacgcgctcgtccccggaagccagcctgtcgcacagcgggccgcttccgtccgtggagccgtcatccaccaggcagacgtcaaaatccgtgaaggtctggtccagcacggaccccacgcatttttcaaggaaacgcgcggcgttgaacacgggaataatgacggatacggagggcatggcggttcagcgcgtttcttcaaaaagttctttcacggcattcatctgcccatccaggtcaaaccggcttcccccgcggagcgcccgcccgcaatagtcccggcggtccgcctttcccgtcagaatatcttccagggcgcggtaaagccccagcaggtggttttccgcaatcaacccgaattccccgtccccaagctgctcccggactccggaacacaacgtggccgccacgggcgtgccaagaatcaggctctcggaaatcacggtggaatacccctcgctgcgggaggaacagaccagccagtccgccgccttcacgtagggatacggattttccagttgccccagcagggatatcctgccctgcaagttcccctccgcgatcatgcgttccagcgtcttcctttcaggcccctcccccagaatccagagatggaaggagaagccctcctgagccagatagcggcacgccgtcaccagccggtcaaagcccttctggcggacgagacggccggaagcgcagaacaggacggccccttccggacgttccggaacggatttccccgccttttcccggacgcgcggaacgtccacggggttgtaaaccacccgcgcatcccgcaaaggccccaccagctccagcagggagtcccggacattccgggagacgcaggccaccgtgtcaaaacggcggtaaacggccttttcctcttccgcgttccggtaggccggcagcgtccagtggttggcggccaggtcaatgtggacccaggccagtttccggcttccggcatggggggagccggcggctatccgcgtggcgtagccttcaatgaaggcggcctccacgtcataggttccgcgaatgaacaagcggtagaaaacggaaggagggaaatgcctgtaaaccagcaatttcagaccgttccggattttgacgagcaggcgcgcccaggggccgtcctcctcccggagggcgtcaaacagaaaacggacggacacattccgggggtagccggccgggatgtcctccttcctgatggaataaacgaccacctgccaccggtttccgttccagcggttcagcagggtttgcagaattttttccgcaccgccgccggacaggctgttgacaaaaaacgccaccttcttcatttcatttcctccagcaaatgctccaccttccgcacggcgctttcataagcaacctcatcgccgccccgggccgccctttccctccaatcttcacaggattccctgccggagaggaaatcctccatgccgccggccagcgcctcatcatgattttccacaatgcgcccgaactttcccatgccaagctgttcccgcacgccggaacactccacggccagaacaggcaggcccagcgccagcgcctccgtgaccacggtgctcattccctcgctgcgggagctgcatacgaatacatcggcagtggccatccacgggtagggattctcccggaagccgggcatcagcacggagtccgccactcccagagccgccgcctggctttccagctcccgcctccggctcccttcccccagaatcaccagttccgcctgccatccgcgctccttcaagcgggccagcgcggcaatcagccggtcaaagcccttctgttcttccagacgccccacggaaacaaagcggaaacactttttttccggcactttctccgcagcggaggcaccggaacgcacagcatcccggtccaccggattgtgcaggacgacggacccggcatgcgctccaaagcgccgttcaaacgcttccctgacggtttgcgacacatgcgccacggtttgaaaacgggcgtaagccttcctttcctcctccagcgaccggaacaccggcccctgcgtccagggccgggcctccaggtccacatggacccacgccagcctccgggccttcccttccggagcggctgcaagaaggcgcgtgggaaacccttccgtaaaagccgcctccacatcgtaatccccggcaatgcaccacttgtaaatccagcccgcaggcagaaaacggtacaccagagcgtacttgagccggtagagccagccccggccgcccacgatggtgcggtaatgcgcgtattttcctacttcctcccggtacggaccgcagtccaccaccgtgcacaccgtcacgtcaaaacgctcccggtccaggccgcgcaccagcccggagagaactttctccgcccctcccccggacagggattccaccaggaacaggactttcagacgggaacgcggcataagacgggcttctgaaacgaattattttcccgcgcacggggaggaggtgtccaggcttctgtacacggcatacccgcgggaagagcggccatggggctccacgtcgcacaggacgatgcccatgcgcttcagctctccgtttttccagatcttctgcaatccggccaaatcacgcttcttcacgcagccggcccgcatgacgtacagcgtaacgtcggccagccgggcgacgatgcgcgcatccgccagggaggagtagggaacgcagtccatgaagatgaaatcatactgctcctttacttcctccatcagcttcctgatgcggtcatgcagcaaaagccgggagggatggtccggcacggttcccgcaaacaggtaatccaggtggtcggaaacgggggattgttccaccagggaacgccagccgccctccccggcctgctccagatcccccaggcccggctttccggctccgcccagcagggcgctgagcgccccttttcttaaatccatatccatcagcagcaccttctttccggccacggccagggaaagggccaggttcacggaaagataggttttcccctccccggaacaggtggacgtaatcaggacgctgagggggttcccctcgttcccgtcggaaagggccaccatgcgttccgccagcagggggaagcattcggacagctcggaaggttcttccagattcaccacgatttcctggttcttcagcttccgcggcttgcgcggcagttccccgtacacgggaatggaggtcagggtttctatttccttccggcgcttcacgctggaatccagcatggccgcgaccacgcacaggaacacgggaatggccatcccggccagaaatcccaccatcagaatcttgggaacgttcggctccagcggaccgttgccgccccgcacgccgtccaccatccgcgcgttgtcttccgtggcggccagggccagggaattttcctccctcttgttcagcaggagaacgtacagggattcccggacgcgctgctcgcgttcaatgtggttgacggccctttccctgctggaaacattcctgatatgctcccgcgtctgctcatgctggtcctgcacgttcttcttcttgaccagcagggacgtatagtagttattcacggaacgcttcaacgcatccttcagggagttcaaattggcctccagttcgcggataatcggattgttgtccccggcattcaccttcaggctcgtccttttcagcagggtgtcattaaaaacgctgatctggtcccggatgcccatgtccgctatctttgaattgatggggaccagcctggcgtcatgctcggcctcctgctccaggtaatctttcaggtattctatggacttgatttcaagctccagctctctcaaatccttcttgtcattgaggctgttctcatattcctccgtgagggccgtggacaggtccgtcagaacgtccgtctcctttttcagatcttcaatggcgaggtcatttttcttcatttcctcactgatgacgtccaggcgatctccgatgaactcgttcgtcttcgtgccgcgcttgttcttttcctccagggacgcctcattgtaaaaatggacgatgctgtacagaatatcctccgccttcaccggattattgcagcgcatggaaatgttgatcaaatcattctttccgctcgcctttctgacggtcaggccgcttcccagccccatcgccgcattcttcacggaagttctcctgacaatcacgggaacgttcaggctgctttcgtcaaacttggaagttttctccacgatgaaggcctgggagtcaaaccggatttccttgccgaagacgcccgtctcatgcccgtgatgatccttctcatccttttccaggcggaattccgttccggaaacgggaatcaccaggaaccgggcgtcagccgtttttccctcctgcgtgaactgcaccgcaataggggagtcctgataaatttccaccttccggaacccgttcttcttccagtaggtgacgtccagcttcaaattccggactaccgttttcagcagggaatgggaggaaagcaggaaaatttcattgtccagattggtggcgcccgtgttgactattccgttggtggaggccagcaccgtggcggccacggattccctggggtaatcatccttgatgaggatggtggtggcctttccgtacacctggggctgccgcgccgcgtacagataggccaggggcaggcaaatgcaaagggaaagcacgcaccagtaccatttccggacaatccggcccatgatggccctggggctgggaagcagggatgccggagcggcgccgccgacatccagggtttccttcttgggggagaggtctttcatgggattaaatgcagaaggccagaatgaccatggcaatggaggtgccggaaatcaggtagggataaatctggagctgttcgctacgcgtgttcaccttcctgtccgacggagtgacgtaaatgacgtcattctgctggatgtagtagtagggggaatggaacaggtcgctgttccgcaggtccaccttggacgcaatgcgctctccctgtgattcccggataacgtaaatgtcacggttgccgtccatgttcaggtctccggccttgctcagcgcttccagcagcgtcaggcgttcccccttgatttcataattgcccggcttggacacttccccgagcacggagaatttgaagttcatcaggcgcacgctgacggcggggtccttgatgtacccttccctgatgatttcactttcaatgtcgttcgccagctgggtgcaggttttgcccacggccttgattctccccagaacggggaacacgatgtcgccgtccgtgttcacgaagtacccgcgctcgtcatccctggggctggaaacgctgccgctgtccttgttgaacatctgcgcgagcgtgggattcttgctgctgacggaaatgaacaggcggtcatcctttttgatgactatcttatattccttcccgatggacgctttctggtccagcaccaggttctggacgtaattgacttcttcaggcttgacgcaggcgggaagcgcgcacgccagggcggcggccaccagcaggcggctccacagggagggatgacggaacagatgtaggtatttcattggatgattaagcagaggttagatggtaaggggtttcttcaagtccaggtagtcgtacttagcgtagggagagttgttgctcttgtattcgggtatcaattgcttcatggcgcggatggtatcctccagatggtgggcttccgcatgccgcaccagctcttcaaaggcttccttcagctcggacatgtcatatttccgggtctggaaaatgcggatgcgctggtgggaggtttccagcgtatgttcatagtccgccagaagttcttcataaagtttttcgccggggcgcagtccggtgaagacgatgcggatatccttcagcggagagagccctgccaggcgaatcatttttttagccagctccacgattctgacctgttcccccatgtcgaagacgaaaatctccccgcccttccccatggcgttcgcttgcagaatcaggcggcaggcttccgggatggtcatgaaatagcggatcatttcaggatgtgtgaccgtaacgggccctcccttcctgatctgctccttgaacaggggaataacggagcccgcgcttcccagcacattgccgaacctcgtggtaatgaatacggtggctccttttccgctctttttcagcagggcttcccccaggctctgcacgtacatttcagccagccgcttggtagcgcccatgacgctggtggggttcaccgccttgtccgtggagaccatgacgaaacgctgcaccccgtacttgacggccagggaggccagatgcatggcccccttcacgttattgaccacggccgtgcacgggttctcctccatcagcggaacatgcttgtaggcggccgcatggaaaatcacatccggccggtacagcttcatgctttcctccagctggcggcggtggcagacattggtgatggaagtggcaacgggaacgtggggatatgatttttccacctcctggcgcaccagccacagcggcgtttccgcgtggtccagcagaacgatccggcgcggggaaaaccggcacagctgcctgaccagttcgcttcctatggaaccggccgcgcccgtcaccatcaccaccctgcccttgatgccgccggagattttttccatgtcgatgctgatttcctcccgctccatcaggtcttcaatctgcacttcatccacggccacgccggaatattcgtgaaacgactggaacaggtcgtgggaaatcatcagttcaatccccttttccaggcagacgtccgccagcttcttatctcccagcaaatcgtccttccccacaaaaatgactcccgacgcctggaacacattcaaggccgtctccacctccgcggcctccttgatcaaccgtatcggaatctccttgatttccttgccgtccgcctccggagcggaagtcaggatgcccaccacttcatattcctcacttttcaggcttctgataagggaggctttcaggaggcaggcgtccagcttgcccaccagcgcaatcctcttgcgtccggtcgtcgtgagagaggaaacggattcgctggaattgaggtgttccagccatcttctcccgccgatgcacgccatgcggcacccgatcaggaccaggaaggtgatgacgaaattgaaaatggcgcaaacgacatgccccttgtaatacgcgggccagagaagaatgttaaagaggcacagtagcatgctggccagcaggatggccgccatcagcttctgcaaatccttcatggtcgtgaaccggaccagggtcttgtaaacgccggaccgccagagcatggtgcccgtgacagcgagatcgaagagaagggctacccccatgtgcttgtccacccagtcacccttgtaaatccattccccgtaatagcaggccagcagcgtgaccagggaggaaagccccaaatccagcaggaagatgaatttcccgctggcattcagcagataatgccgggcgtaatagaggaattttgaaatctggctatgagtctcggtcataagagcgaacattaaagattcaacaagacgtcaatgatgcggtccacgtcctccccggccagggaagcgcccgaaggcaggcacaggccctgttcaaacaggcggtccgatacgccggagccataaaacgggcaggagcggaacacgggctgcaaatgcatgggcttccagagagggcggctttccaccccggccttctggagcgccagccgcagcgtttcccggtcaaaccgggcctcctccggattgacctgaacgcaggtcagccagtggttggaatggtagcgggaatccggattttccagcagggacagccccggcacgccggaaagccggcggcggtattcttcatggatgccgcgccttttttccaggaaggaggggagggaaagcatctgcccgcggcctatgcccgcgcacacgttgctgaggcggtaattgtagcctatgcgcgtgtgttcataatgcggcgcctggtccctggcctgggtggcgtaaaacttgaccctgttccgggattcctcatccggacagcacagggcgcccccgccggaggtggtgatgatcttgtttccgttaaaggaaaaggccccgtacgtgccgaacaccccgcacttccgcccccggtattcggaacccagcgcttccgcggcgtcttccagcacgggaatgccgtatttcccggcaatctccatgatctcccccatgctggcgggcatgccgtagaggtccaccggaatgatggctttgggggtgcggcccgtctgcctgatgcggtcccggatggcttcctccagcatctccggagacatgttccacgtcttttcctcactgtccacaaacaccggggaagccccctggtaaatgatgggattggcggaagcggcaaaggtcatggactggcagaggacttcatcccccggccccactcccaccatcaccagccccagatgaagggcggaagtgccggacgccagggccaccacatgcgtttcccccaggtattcctccagttcccgttcaaaagcgtccacgttcggccccaccgtcgtcacccactttgattcaaaggcttcatgcacgaacctttcctctgcctcccccgtgcaggcgagggacagccagacggtggatttcttctccggcgcaggggacggcttctttttcagcacggcgggacagcccgcataagtgcctcccaccagcgcatcccggaccagggtggaattggcgcccaggacgacgttttccttcaccgtgcggcacgggagcaccacggacgcggcccccaggaaattggcattacccagcgtcacgcctccggacaccttgcagccgttggccacgacgttccagtttcccagcgtcacgtcatggccgatcagggaaccgcagctgaacaggttgaaatctcccatgtccacatggcagctgaagatgtggccgaagctgatgacattccccttccccatggccacccggccgcggtcataaaacttcacatcaggggcgatgatattgggaaaatccagcaggggattatccaacaggccggaaatgcgttccaaagcccgtggcgaagcaatcgcgatcacgacggaaagaggctccttccaggcattcaggtcttccaccgtgcccagcacgcggccgtactcattttccgttccggcggccaccccgtcatcaaagaaacctatcaaattccaggagggggacttcccgttgattgcgcggaggcagcaggccgtttccctgccgaatcccccggcgccgatgattgctatattcttcttcattttccggaacccgtgaatttttccatggtggcgcttccctcagcgctgatgccctggcgctggaccaccttcgccagcgttaacagaatgatgcgcgcatccagcaacaagctcagatggtccacataccagacgtccagttcaaatttgcggtcccagccgatggagttgcgcccgttgacctgggcccagcccgtaatgccgggcctcacgtcatggcggcgcgcctgctccgcactgtacaggggcaggtattccggcagcagcgggcgcggaccgataaagctcatctgccccgccagcacattgaacagctggggcagttcatccagggacagggagcgcaccagcctccccgcgcgcgtcagccgtcgttcgtccggcagcagttctccccggtcatccttttcatccgtcatcgtcttgaatttgacgatgcggaacaacttgccgtggcggccgggccgcgtctggcggaaaaacggcgttccgcggttggcggcggccagaagcgccgccagcgccaggaacggaaccagcagcaccgccagcacaatcagggcggcggaaaaatccagcaccctcttgatgcaattaccgtaaatcatgccgacgccctcccgtaaaaatggagcaatgcttcccacaccatccggcagctgaaacggcttttcacctgttccgccgcttccgcgcccatcctcccgcgccgttccgggtcgtcccgcatggccgccatggcctgccggagagcctcttcatcccgtgccggaaccagcaggccgttcacgccgtctttcacaatctcattgcacccgcatatatccgtggcaatggagggcagttccatggcacccgcctgcagcagcgaattgggaaatccctcccggtagctgggcagcacgaacgcgtccgcggcttccagccagggccggatatcctcctgaaaaccggggcggaacacgccgggcacgtccagcttgtctccagcgtaatcctccgtccatcccaccagagccagaaaaacgggagtacgcccggcctctgcgcgcagggcggaaaacgcggcaagcagctcacggatgcccttgtcttccgtaatgcgccccacaaaaacaaacagcacggcatcttccggcagttccagacgctccctcacttcctcccggcagccggaacggcggaaataatcaggatcaacgccgttgacgttcccgtgggccaggatttccaggggcttgcccgtcaccttctccgccatcaagagctgccggacgccctccccctccggaataacgtgggtggcaaacaggcaggtcaggcggtccatctgcttgagcaggaacttgaaggcccccttccggtagggaaaaatcaggccggtgaaggtatggacgcggaccggaacgcgggcaagagccgccgccgccatgctcagcagtccggccttgggggtcacggaatgcactccccacgggcgttccctgcggaacagcaggaacaggcgccacaggcttttcaaatccttccacagggaaatggcccgttccatctccagctccacggtttccacgccttcgcggcggcggatgcgcgcatgcgccgctccgggggaagccacggcaagaacgtcaaaaaacccgttcaggtaattcaactggcccttgagcagcaggtccagcgagataggggacgccgcaacccggataagcttccttttcatgcgttgtaaatattcatgtaaaaggtgaaggcgtaaaccaccgggataaagcaggccagtttcttttcctggtccgcccagaacctctgcttgaaaaagggatagatgaagacaaagcccatcaggaaccaggaaagctgggcgaacctgttgctgaacgccgcgtacatgcagagaatccagaacgcattggccgcaatgtagatgttcagcagccacgtatacatcacgtcccggtattcctcccggaacaggaagtaacagcccgtcacaatggggagcgcgctgtaaatcaggaaatcccagcggaaacccacgctgctgaacaatgcggaggaagccttcaattcatccgcctggttgatgtaaagggtcaggcgcggatcatcgaaaaagccggaggaggcgatcatctccccgatggcgggaccggccagaataacggccaggatgctccccacccacgccgccacgtaataccgcgtatccgtgataaaccaggcgcaggctcccgccgcggccagcagcatcatggacttgtgcaggctgacggcgagcacggtgcaaaggagcagcattttaaggttgctgcggaaggtgaggcccagaatcatcacggaggcggccatgccgttgcggacgccgttgaccccatatacccagaaggtgaacatggcgcacgtaatcaggaagggaatgaaccaccgggctccgaaaatcctgtagctggccagggccagcgctcccacgtataccgcggaacaggtcaggaaataatcgtgcacattgccgtgctgcacccacgcatgcagaatgacggcaaacagccattctcccttcatgcccgtcaactgggctttccagttgcccgcctcctcctgctgaagcgtctggaattccgcggcgtaattgatggtatctccaaactccgcgctgacgggacgcgcgcccatgtacatgatcagggcgacgacgaataaaaagccggccagactgtccagcctggcggtggaagcggaaaagattcctcccgttcccgcctgataaaccgcaccaaggattaaaaaaagaatggtccagttaaacaatgcagtgtatgaggaaatgggaataaaatcgaaacacatgccaaggcaaaaacgggcgcggccggacattagcggattaccagtccgtttgaaaatacaggcccggaaaagctggcaaattcagcctcttaggcaggggaggaaaaacggcttttccgttgggataaaaatccagaaactccttaaagtttatattgtcagaatcttcgattgacagcggactggtaatccggtttaatatttggccctcaaaaaacgatttttctttccctttatcattatatattgaatatgaagaaaatagcaaatgactctaactatacgataatgtagaaaacagcttttcggcattgtttgacgcgcccggatgccctatcgtttcctccggtccgggccatgtcccctgcttccgttccggcaggcatcctgttcatggcggcggagcctttacgaccgcacccatgcaccaccctgttcaaaccattccggaggctcccctcgtcagcattatcgttcccgtgtacaacctggaaacgtgcgtttcctcctgcctggacagcctgctgcgccagacctggtcaccgctggaaatcatcctggtcaatgacggttccacggaccgcacggcgcacatcctgaacgcctatgcggcgcggcatcagaacatccgggtcatcacccgggagaacgcgggggtggacgccgcgcgctacgccggcatggacatggccgcgggagagtatgtgatgttcgtggacggggacgacgccatttttccggacagcgtggaagccatggctcaaatggccgtccgggaacgggcggacgtcgtcatcggagactacgtccgccatctggaccgcttcggcctcttccgcaggaaggacgggcatatcccgcacagccgggtggtggaaagggaggaattcctgtcctcctaccattccggcttcttcggcatggacaggcacggcctgttctacacctacgggaaaatgtgcatcaagctttacagaagggaattccttttgtccagccgtccctcccccagcgggctcaggtacgcggaagaccagctgttcaaccttcaggtattccccagggcggaacgaatcgccgtgctggcaaaggaggtgtatatctataaattcggaggggtgaccgggaacctgtccctctccctctttgacgacatgctccgccttcattccctcaagctgaccctgacggaccgggaagactggaaaaaaagcgaactgggggccttcctgaacaacgtgcgcagctttctggcaaccctggccgtctccggaaaactgaaggcggacggcatgccgcaggcgcttgaaaaattgaacgccagctccatctggcgccacgcgctggaagcctatcccgcccgtgacgacgccttcctttccgccatgcgccggaatgacgccgcggcggcctacgcggaactcagccgccataccttcctgaaaaaaatcgcctacaggctgcgccggatccttctgcggctggtccgctgaatccattcccgcaccgtgggaacgtccccacgctccccggcacagccgccgcagggccggaaaaagccggagccgggaagaaacagttttttattgcgttccgggcgggtaaatcatatatcccagcggttcagcctccaccgtttttttcctaccttccatgccctccatttccttcctgaaaaacctcggagtcctgctgacgggctggctcctcttatgctgcggcgcgggagcggcggaaaacggcagaatcctgatggtgacggaagcgaccttcccgccctacgaattccgggaggggaacgccatcatgggcattgacccggaaatcatgcgggaggtggcccggcgcaccggcagggagctggtcattgaagacatgagctttgactccgtgattacggcggtggtctccggaaaggcggacgtggccgcctccggcatcacggtcactccggaacgcaggggaaaggtggacttctccatcccctacgtggaagccgcgcaggtcatcatcgtccccaaaggctcccccatccggggccgggaagacatccgcggcaggagaatcggcgtgcagcacggagccacgggagacacctacgtcacccggaacatccagcagccggaacgcttccccaacggggcgctggccgtagccgccgtggcggcgggcaaggtggacgtggccgtaattgatcaggacccggccagaatgtacgtggcaggcaatgaccggctggaaatcctgccggaacccctcacctcagaatcctatgccattgccgtccgcaagggaaatccggaacttctccaggacatcaacagcgccattgcggacctgaaagcctccggcaggctggaggaaataaggaccgcgtacgcggccatgcaggtcaagtccgccgcgggagccggaaaacacgccgccggggggaactggctggaaaacatgtggctggacctgaaggactcctttgacgtcaacttcatgcaggaaggccgctggaaatacctggccaacggcttcctggtcacggtggaggtctcctttttctccgtcctgctgggcatcctgatgggctttgtggtagccgtcatccgcgccacgcatgacaagacgggcaatttccgcttcctgaacgccctctgcaaactgtacctgacggtgatccgcggcacgcccgtggtcgtgcaactgctcattatctactttgtgatcttcggtaccgtggacgtcagcaaggtgctggtggccgtggtggccttcggcttcaactccggcgcctacgtggcggaaatcatccgcggcggcatcatggccattgacaaggggcagtttgaagccggccgcagcctgggcctgggatacgcccagaccatgattttcatcatcctgccccaggcctttaaaaacgtgctgcccgcgctggggaacgaattcatcgtgctgctgaaggagaccagcgtctccggctacattgcccttcaggacctgaccaagggcggcgacatcatccggagccagacttacaccgccttcatgcccctgacggccgtagccctgatttacctctccgtggtcatgctgttcagctggctgctcggcaaactggaaaggagactgaaaaacaatgaatgaacagcccggaaacacccccatgttccagatcagccgcctggtgaaggaattcaactccgtgcctgcggtcaatgacgtcaccacgcagattgaccggggggaagtggtcttcatcgtagggccgtccggctccgggaaaagcaccttcctgcgctgcctgaacctgctggaggaacccacctccggggaaatcctcttcaagggggagctggtcacctccccccgcacggacgtcaaccagttccgccggcacgtaggcatggtcttccagcacttcaaccttttcccgcacctgaccatcctggaaaacatcacgatcgccccggtcaaaacgggacgctccaccaggaaggaggccgtggcccaggcggaaaccctgctccggcgcatcgggctgtacgacaagaggaactcctatcccctccagctttccgggggacagaagcagcgcatcgccatcgtgcgcgccctggtcatgaatccggacgtgatcctgtttgacgaacccacatccgccctggatccggaaatggtgggggaagtgctctccctgatgaaggacctggcgcagggtgggctgaccatggtggtggtcacccatgaaatagggtttgcgcgggaggtggcctcccgcgtcctgttcatggacaagggaaaaattgtggaagaagggcctcccgcccaggtgatcgaccaccccgccaaccccaggctgaaggaattcttctccaaggtgctctgacgcggccagccccggaaacttctccgccggagacctgccccgcgccctcctgccgccgaagcaggaggcagcgaagaccgccttacttcttcttctccctgatctcccccctcatgcccagcttgacgtccacggggacggagaccggctccacaggaaccttgtaaatcatccggaacctgagtttttgcatattctccggctcttcaaactgcaggcgccttgtccattcacggtaggaggagttcatgctgctccccccgccacgggattcggtttccagaacttcgtccttctcattgagaatttcaaaacggtccaggtcgaaggagctttccacccccagccccagaatcattttcctcatcttttttccgttcctttcaaacgtactgcactctttcaggaaaagcctgcctgtaggcacgctttcagacaggacgatgtctccgccgcccgcttcctcccggtcattggctcccggcagcggcacatgctcttccgcctcttctgccaggggaaattcgtaaacagggctctccacggaacgggagacgggaacgcggaacacccctttcagccgtacccaggaagcgtccggagaaggcagttctccggcaactccattgacggttgcctgtactattccgccttcactccgcgggtacatgctgcccatcctaaactctgccggggccagcttcctgccggtggaatcggtcgcctccagatactggataccgtcatcgtatcgcgatccaaagcccaagggggacttgacgctgaaatttactccgaacttcagctgcagaggggattcctggggcgctccgttaatccacatgctgtttttttccatgccgacggaaacaaaaacgaccttcaccggatttttttcctccggcttgccgccgccccacgccgccgctcccaaagccgcagcggcgcacagcaaaaaccgggcaacaataatgctctgcctgttcatcctagttctccttgttcggggtatcctgttgttccacggcgccggacaggccgcactggatacggacgggcaccatgattttccttaatccctccgcatattgaacggccaccttcagttcctcctgcttcttcccctgcatccggaagtaccggccccagtcataactcttcagggagcgtccggagctggaaccgtaattttccgtcaccagtggagcgccatccggggaatgcagttcaaaatccagaaagccaagcggagtggaagaatggacttccaccctcagcatataccccttcgtgtcgtctccgccctcatcataatggcctttcagtttgaccttcacgtccccgccgtccagtccggcgttcttgagcaccagaggaacggagaaatccttgaccgtcatcttgagcgtcacgctctctgaaacggcggggctgctatatatcaccaagggaacctcccctttgacttccacccacctggctttttccgaaggcagccaggacggcgtacttaaaaaaattgttccggctatgttgctctgctggtaggaacgggaatcactgtaatggcaattcgttttggcaggagaacttccttcggaatccgtcagggccagctcggaaccggactccccgccataagccaccttccatgaagaagacgtttccctgaccttcaaatccatggaaaacgaccggctggcttttgaaaacggcccggcctcctggaggttcgttctccaaccatccagggaaacggttacggcaggttcttcagggctttcctttccggcagcggggccggaaacagccgcgcagcagaacgcggccagccagggcaggcaatagtgaagcataggcagggggggtaagggtactttttcagcataacacgttcgcagaacggcacaagatgaaaagagaccgccgccaaggaagaagcgccggttccggcaaaacgctagcctgctttctttcctccccgcttttccgcctcctcccgtatttccccgcctatgccgaacctggcatctacaggaacggaaacatacttcagggcagttttataaaccagccggaccctgcatttgtctgcattcattttttccggaggggaaaacgtaaaatcggccgtccaggttgttgactcatcatcaatctccgaattgtcaagggactggtactccagcactttcccattctcgtcaagaagctggaatttttccggacggaacgcgttattcgcgtccagacaaatgctgagcatgagctgtttttttccatcttccgtcacccgctcgcattttttcacatacaggttccccaccggcagctcgcccggttccaccacatcgttcacattcccgccgttctcttcctcaatgccaggaagcggaatgaaggcggcggcgccctgccttaaaggcagttcgtaaacagggctttccagcgtgcgcgccaccgggaccctcaggcatcccttcagccggatccaggcacagccggcagggggcagattggccgcagtgccttcaattaccgtgaaactcactccttttctactattttcattcagccatgccgtttgaaattccacaggggccagctccctgccatccgctgcccaccttcccaaagactggttttccaccacgctactctctccaaacccccagggttcgcggatgaaaagaacggcgctgcacttccattgcagtaccccttccccgccgtcattccccgtgtcccgcttcaaccccgcttccctaaagacgattcccactttttcctccattttcccctcttccgctccccggcacggctgccagcccggcaggcagaagacgatgccgcaccataaacaatgtatcgccttcatggtttccgctgccgtgaagtttcccggaccattccggacagaccgaatttcaggtcgacaggcacgtcaatccgtttcagctcagtcatgtaattcaccaagacctgtatctcccccttttcttccggttccagcctgtaatcccattcccaggagagggaaccgccggaaccggaagaatagccccagctccaatttttccccatcacgggagtaccgtccggtttcatgagcgtcactccgcaaatacccagcatgcgtgacgaaaccagctccacgttcaggtttatttttccggaatccttattgagcgaccttgttattttcagagtagcctgcgcgtctccctgccggccgtcatccatcaggctcccgcctttcagaacaacatggcgttcttccttttccttgtccatggaaaaaagacagccctcggacgtcacctccttctccgctgtcaccagcagcatattcccctttacactcacccagcgggcatccggagcgggaacccaatcttccgtttccatcctgaattcgggatcgcgggcatgcaggaaatcaacataatcggaaggaacgttcccgccaccggtggaatcacgtatctccaggcggatgccctcctttctgctccctatgattttgccgggaccgggattggaaaaacccagcacgacctggaacgttctttccggtttttttattccgggctcccaagggattttacttgtagccgacagaagaatgacggaaaccgccttttccgccggcgcctcgtcacccggcacggaaacgcccgcaaacaggcaaaaaacggggattgcgaaaaagattttcatcagggcagttgttacagtaattcacgctagcatttccctttcaaggatcaagggtaaaatgaaaacgtcaggaattcactccctctgccgccgcatgggaacggtggaagcgcagcattccgttcccgcaaagccgccttccggccatgttgtaaaaccgggaagccgctgccggaaaacttctccgcccgggtgaaatgtccatcccgagcaatgcctgacgctatggaaagccgcaggcaggcatagcgccgcctctctccggaaaggcctcacacgagacctccgtttttacaacacgatatccacgttgtaggactcctcaatcaacagatagtcacacccatgctgcctgcatttctcaaggttgtccctgttttcacgcagcaggctctcccgtgtgcaggacgcctcatccatgcgctgctcaatcgcgtttgcatggtccatgatgtcatggtaatgcctttgaatataattctctgaaaaaatcaggcaaacataccggatctgctcccggcaggccggtgtaaaatccttcttccagtcaaaggggatgtagcacccttccaccaccagattctgcccgttttccatggcggtttttacaatttccctgataacgctccaaaggaagggggtgagctcttcatctgggctttcaggtgcaaggggacatattccgctgcgtatcaaccccatctttaaatggtcaatggataaatagggataggaatatttttcaagcgcccgctgcgccgcaagcgtttttccggtatgcgtgccgccgccaatcagcagaatcaccggaaatccctcccccggcgtccctgcgaggcatgctcgattcgcccgatgcgggcaacgcccggcattgttccatttccgttatccaggttcatgttgactaactgtggatatattttacaggatttcccgcaagccgcgtgttttgccaaaaaaaacgggccgggccgcacagagggggaacagggggcgcccctccctacaggcattttgccctgctttccggaggcacgttctgcggctagggaccctaaagttccagttgctccgccagcttgatttccgcaaacattccattcaagcctgccatatacgcatcctgtactgcctgggccgggatggaatgctccatgatcttcaaatccctggcagcgcaggcgtcatacaggagcgtgacgggaatgccgtaatccttcgccgcgcgcacggtggtatcaatgcacatatgggtcatcattccgcagacaaccagttcattcacttccctggcttgcaagagctccagaagattcgtccggaaaaagctgtttggagcatgtttcacgacaaccggctcatcccccgcgggagcaatgtccggatggatttccgcgccgacggtatccgggaggaaaaacgaagcgtccggacgggtgttgatgtgctggacaaagataacgggaagccccttttcccggaaccggtccagtacggccctggtccgttcaagcgcttcaacggcgcccgccagttcaaaccggccgccgggaaaataatcattttgaacgtcaataataagcaatgcctgcatcagcttctccatccggccatttttccagttcttgcagaggcgggcaaggaaaattacaggagcgcgtgtactcctctcctccccgctaccgttgcttttgcggaatctggcagaatgaagtaatacgtttgacggaagcatcccgggaaaagagcctcacagcggccataccgggaaggagaccgccgcggccgcttccggcccggggcagcccatccgcaggaaggccgtccatccagcaacaaagcctttgccgtctccggcaaaggctttgagaatggcgccccgtcgcgggcgcggaatggatcggaaccttaattgctgtaggaggattccacgcgcttggctacgtcgcggtagccgtattcggcgtcgtaaatctgctggaacgccgccagggattcctccttcttgcccagcttttcataaagcaggccgatcatgtaaaggatttccttcttggtgtcattcatttcaatcagttccttgttggcttcctccaactggcgcagggccatatcatgcatgtttttggcgtcatagcacttgccgagcaacagcatggcgcggatgcggatatgggggttgttgcgggcgcgctggagctccggaatggcttccgtgtagttgccgcagtcgaagagggcctgccccagttcaaagcgcgtctgcgggtccgtggggttgttttccacgcgctggcggcacacggccacctgctgttccgccgcttccttgctgaactgggcgagctgttcctgaagttccttgttgtccggctccgcggcggcgcggcggcggatttcctccacctgggccttgcggtagcgctcgttcatttcagaggccttgttttccagggaaatatcattgttgctgaggctgaacgcgtagttgtagaaggaataggcattcgcccagtcctccatctgttcatagacgccggcgatgtcgcgcacggcggccaggtcctgctggttctgggcataacgggcggaaaggagcccaaggcgttcttccagctccgcacgggtgaggcccttcttgtcgctcttgtccagggagttcgtttccgcggagttcttcatcacgtcccggaagctcttggcttcctcccacttctgctgctgcatcgtggcgcgggccatgcagtctttttcactcttcacggccacgctgtccgtggggtccagcttcacgaggtcatggtacacctcagcagcctgggcgggcatgtcccgtgaaacgtaatgggaggccagcatgtggagcatcttcttgttgccgggatggccctggcggacggtttccagcgcaaaggcggccaggtccgggaagcccacgtccatggcggccgtgtacagggcctcgttgaccggaatgctgtaaggatcattttccagttcgtcttccagcgcggaaagctgggtggccgcatccttcttggaggaggtgagcttgctggtgctgattttcatgccgctgaacaggccgcctttcttggcttccgggttcagcttgatttcacaggcgcgcagcgccctgcggccttccagaaagccgggaagctgcttcaccagggccttgagcaggctgacggcatagggataattgttcatgtccaccgcctggcgggcgcgcacccaaaattcggcctgctggggggtcaactgttcttctgtaatcgtttcaatcatggaactatataagcgtaaatggtgaacaacggcagcgctccaaacggggaggctccgcatgtaatagtttaatgctatcagccggggaggcatacttcaaccttgttttttgttcccgttaggaaaaaatacgccgtatgagactggatgctcttttatcccgctacgggtactgttccaggcgggaagcgccgggctggatcaaacgccactccatcacgttcaagggggaaccctgctccgcccccacggacaaggtgcaggcggaaggcatcctcctggacggggagccggtggagttcccggacggcctgtacgccgccctttacaagcccgcgggatatacgtgcagccatgacgacagggagggagacgtgatttacgacctgctgcccttccagtggcggcacaggaaccccgcggtttcttccgtaggacggctggacaaggaaacatccggcctgctcctcattacggacgacgggaaattcatccaccgcatgacgtcccccaggcatcacgtcgccaaggtttacgaagccgtcacggaagaggacattccggcggaggccgtggaactgttcgcctccggaactttcacgctgaacggggaggaccgcccctgcgcccccgccgtgctggaaatcctggaaccgcgccgcgcccggctgacgctgacggaggggaagtaccaccaggtgcgccgcatgctggccgccgtgggcgctcccgtggcctccctgtgccgcatttccatcggctccctgcatctggacagcctgaacctggagccgggggaatggatgcccatccgtccggatgcgctgtaatcctcctgttcgccatgtggattcccatttccgacgctcctattgcctgctttccgcactttgaggtggcggcggagtccggggactggattgtggtggacaagggcgcgcccctcatcgtccacccgtccaacgggaagaaggagcccaacctgctggagggcgtggaagccctgctgagctatgaaatagtcaacggagccgccctttccctggtcaacaggctggatcgggaaaccagcggcctgacgctgatcgccaagaacaaggcggcggcgcgcgagctggggagggccatgcagcggcgcaggatgcacaaggaatacctggcaatcgtgcaaggccggccggagtgggcggaaacaacctgcgccgcccccatcctgagacagggggacgtcgcggaaagccccatctgggtcaagcaggccgttcaccccgccgggaaggcatgcgccaccgttttccggacggaacggacgtggaacacgccccgcggcccgctggccctggtccggtgcattccggaaaccggacgcatgcaccagatacgcgtgcatctgacgcacctcggccatcctattctgggagacaagatttacggcccctccgaagcctgctatctggaatacatccagcacggctggagccgggagctggaagaacggctgatcctgccgcgccatgcgctgcatgcctgccggctggagttcccgtttgatgaagaagttttcaccgcggaagccccgctgccggaagacatgcggcaactgcttgaagcgggggattaaagaaaattccgtcagacgaccggaatgacgtcatcccggtcaaagcgcacttttgccagacgggcgtatttgtccgcctcttcatcccggtagcccagggccagggcgcaaagcgcatagtacggggagccttccaggttcagaatgcggtcataggccgcagggtccattccttccagagcgcaggtatccacccggaggtcagcggcgcagctcatcatgaacccgagggcgatgtacacctggcgttccagccatgccttcaggacttccggagacttggaatccaccagttcaaaaatgcgcgcgcggtactgctccagggattccatggtgacgccgcgcacttccacaatgcgttccagatagcgctgcacatcctccggcttgaagtccctgcgggcgcagaagactaccagatgggaggcgtccgtaacctggggctgtccccaggaaacctcccggagccgtgagcgcacggacggatcctgcacgtcgaggaatttccacatctggagaccgagggaggaaggactcaaatgcagggattccagaagggcctcccaatcctccgccggaatttggcggtccgggttgaatatcttggtggcatagcgccattccagcgtcttgatcaattcctgagcgttcatattcgtataaaatgattgatgcgggagctttccgcgtagccggcgcgccgggcggcgttgccgccatggcatgcgccgcggtttgccccatgtcatggcattttccccgtttcctccccggaatgcaagccaaggttccggcacaagcgcggcagcgggttcttgcggaaaaacttttcctacccggtacgccggaagccccagccctccctgaaaagaagatgaacgtggacggacgaattgtaaaaatgcggccttggaccgtgtccgggggggtccatgaacaaaagctgattcgttcatcttccagcttcactcaccttgaggacggcctgtctcgcattccgctccaaccagggaatcccggtttcccggcccctgcaaaatcacgcaaccccggagaaaaagcccccctccccggaaaaacgtcacacagcccgggcagcttccatccctaaaaacacggatgccgtaacaaggagaaacgcttccggcgcacccattacaagagaaccgcgcccttccccggacattagaggaacttgaccggcatgtagtccccggtctgctgaatggtgaagctgatgcccaggccgaattcgtttttattcccgttcttgcgcacgaacgctcccacgcccaaataccaggaacccatgttgtggtacacgttgtattcctgaatgtccagctttccgtccagcagggagaagcgccacttgccgctgaatgcccaggcttccgaaaaacgctgcaaaacgcgcaggtcaagctggctgctgtcctccagcagggagtgctggttcaggtaacggtgccccaccacgaattccgtggagcgccacggcatgaagcgcagtgagttgttgtactcatggcagccggaaatcttgtccttccccaggatgggggcctgcatttccgaccggtattccatccacggaacaggattccagcgcatgaaggagaagaggttggagaagtcccgctggttgatcgggtcatacaggtacgcatccatgaacacatcccaggaaaaccagcggtgggaattggcgtcccggctggtcatcagcatgttgcgcaggccgtaccggaataccagccccgtggggagggagtcaatctccgtatacctgcccaggctcagggacggcggattggtggtgggggtgtctccgtcaatctggggataaagctcgctcaggcggttggtcttcacgtacgccagcgtaaaatggggctgcacgatgtggttcatgccgttcaggcccagggaatcactgtacacggaggaataacggcgggaaaatttgaagtccgcatccgttccggcataaaaaatcccctggttgagcggcttgtagtcctccacgccgtaatacccggtgtagcccccgcccagtttgggcgtcaggttcaggaaccccatgattttcttggaggcggaaatttcatggaaggaatggaaccggctgtagctgtccgtcatcagcatgcgggcccagtaatcataggaagtggttccgggctccatctcgtccagcatatcctggatttccgtccgcatgaaaggggggacgtactgcttcaggaaggcgaagctggtgcggctttcatacatgacgggagaacggaaaatgggggacttgatgcgttcatagctgaactccgtccgctggtccgccatgtagaagttgttgggaacgaaacgctgcagcagtgaaaaatcattcgtgtcgtccgtgcgggagagaagcaccgtattatccggagaagaattgcgctgatagatttccggataaaagtcgcggagcatgtactcgtcgctcagcatgttgacgttggccttcagccgccagtccgtgcgggcgtttacccggtgggaccacatctgctggagcgccagccgccaccggtccgggtccaagtgctcgcggtattcatcatccccggcgttaatcttcacccccttgtcatgggttttgtaaaaggacaggcccgtcatgtccggacagtccttttccagcagcacgtcacggatgtccagcccgtaggcgaagccgcgcctggtgcggtaatccacatggagggtgcccagatagtcggcggaaggcatgccgttgtccgaccatttttcccccagcaggaacccgtattcattcaggaggtaaggcccccagatggaccgcatgccgggaaggggaagatagcccacctccggattcagggaatggctgagatagggaaagtaaaagaagggaacgcccccgtaatgcagggtcaggttcttgaaggagaacctgtcttccggatacacgcgtatcctgtccgctgaaatccaggtgaggggttcgctgacgtcctccgccgtaacggaggcgttacgggcttccagataggtcttgccggcggcgtccttccgggattcaaacttcccgctgcgcaggatcagcccttccatcttcgcccggatggcgtccgtgaggagcacttcgttctcccagtcgaactccgcgctgctggcgcgtatcaggctgttggtgcgcgtcttgctgtcgctctggtaaatggacaggttccctttcagaaaaaccctgctccggtccatatccgcctgcgcataatccgcaaacacctccaccccggtatccgtgaccatgtgcacgcgcgggccttcaaaaatgatcttcctggctttctccaccctgatgggcccgtcattggtgatggagatattggagggaatctgcggcatgagcgtgccggaaagcaggttccccaccatttccccctggggctcttcctgcccggaaccggaggacggggaggacggcggctgttccgcgggcgtctctgcaaacaggggagcgccggcaatcagcgccgcggcaccccatagctttgcattcatcccaatcatggctagtccacagaacactatgagaaaggacaaaagacaagcctaatgtcacatttctccgccagtggagcggaaatttaccgggtcagaatgccgttggcaatgatgccccaatcggcggcattgccgtctccggcgtcgtccacgcggatttccagcttcctgccgccctccaccgccgccttcaccggaacggaggagccgtccttgagcacgggggtttccacaagctttttgccgtccaggtacacgccgaatttgacgctgccgcgggaaccgaagggcagccccacatccgcgcggaactccttccagcgtccgtccaggtcataggaaaagacggccggggcatgcgccaggatgaagcgttccggcttcccgatcgtcctgaagaaaggcacaggccccaggtcagtcggaaagagaacgtcccacaacggaacggcccaccccacttgagccacggagggcttgcagtcattcaggctgacgctggcggtttccgcaggaatctgggccggggtagcctccagggaggggtcctggcgctccagggcgcgcttccagatggggagccattctttcacctccggacgggagccatgcttgcgctccacctccgcgagggccttccgggcttcctccgcgcggccgcgtatccacaggttctgaacatcgccgaagtaaacggtctgggccagcgaaggagtcttggccccctgggcgtccatccacacgggcagcgtaatcatgctgcgggtgctgtcgcagttcagcacggccacccgcatttctataaagccgcccctgtagccgggccggcagatggtaaggtcaaactctccctttccattcagggaagctcccacggcattggaatcataatccgaaccgccgggagggtccaggtggactacgattccataagcgggccgcgtcaggcgcacccggcctttcagccgcaggccgtccttgacgggaatggcctccagccgttcaaaggaccccggaacgtatttgccgatcatgcgcccgtaggaggcgtcagcaggaagctctgtctccacgccgttgaacaggggaacgctggccagtttcagggcgtccgtaggcgccaggaaagcccccttcccctcgttgcgcagttcattgccgtacgaggaattgccgtggcccatcagggaatcccccgcgttagggtagtcccatccgttgcccgtgtgcggaaggccgaaggaatgccccagctcatgagccgtgccgcctatgtaaatggtggcgttcttccccttggtcactttgaagcggccaccctgcatcatctccgtatccaggaagctggcgggatccagcccctcctggtcgcaggtccagcccgttccctggtggctgaagccgccgccgtaataaggccctacgccgtccggcagctggcacacgatcagcacgtgttccttttcaatgtcaatccccttggacgccagcaccttcttggccgcctcccgggagacgggaccggagctctgcacgttcatctcgctcatgggcctgtccacataggcatcgtaaatgaccagcttcccccgttcgtccaggtccaattggaacgtaagcggagggaacccgttggcctgcatctggtccgcataataagcctggatattcttcaggatatggtcataccgttcccggtatccttcaagagccggcctgtccttgaacgttacgtaaaccacgtgcagctttctggaagacttgggcttcccctggtgataggcgctcagggccttccatgcggcgcgcgcgttggcggcatccccgggattcaccgtccagctcacgggcaggcgggtgaactccgccccttcccgggccgcgggagccggagaccgggaggctgattccgcatccttccccatggcgggggcgttccacgccccggcgcccagggccagcaataagacaaaaaagcgtttcgacataaaatccatgaaccgatgtcaggatatacgggtaaaccggaggtgttttatcaccatatcattcaccagacggttcatattctcggaaaaagagtcgtacaccacttccacgcggcagggaccgggcgtcatcaccacctccaccgccgtggaataaatgaaatgctcccagttgccggagcgtgacgtatggggaaaagccagcgtgcccgcgcgccgcccgtccagatacaggctgcgcagggcgcaggtgttcccgtctgaaacgtcaaaagtgccgttcgcgaaaaaggcgtccacccggtacacgccgggcttgtctatgttgacattatagcacagggcgtccggagactccgtaacgcgggaaaaccagacttcatccccgctcagcccgcaggggcgcgtctccatgcgggcatccgcggaaggatagtcattgggttcattcagataagactccctgccgtccagagcgaccgccatcacctggaaagacacgtccccccggctgggggcaggcatgtaatggcaatactccgtctgggacacgggaatgccgttccggtaaacacggtaataatccgctccggccacggcctcccaggcgattccatggcgggccgccttccactccggagcctccaggctgccgcccatgtgggccagattcacctgccccgccccttcttctgcggcaaccagctccagttccacgaacacgcggcccttcatgcccggagaaagcacggggggagcctcctgcccgttgaccaggcaccgcgctatccggcgcccgtggccgcgcaagcgcacatccaccgtcatgccgcggtattccagcccggccagttcatgaactccctcaaaagactccggaacacaggggcggaactccatggaatccggctgaaggcggatgccgaacaaccccttgtaaaaactgcccagcatcccggcaatgctccagagctggctgtccgaactgagcagcagcccttcatccaggcccgtttccagaagcacgttctccttgttcgttccacacagcagggcggcgcgcaccatgcaggcgaacgccagggccagggcggactcattctccaccgcggcggcggcctgcgcgtaatagccctccaggaacggccacatggcacggttgtggtaaggcggcacgccgtccggcatctggggatggaaacagggaatgccgtacacgcaatgggggaggacggctaccattccggcggcatgcggaccgtgagcctgccccagaagcacgcaaagcagattgcccagggaatccaccttttccgacagcacggggtagccccggccatacaggtactgcccgtacagggcatgctccggaatccggaaaaaccgctcgatgacggcggacagggagacgcttttttcctcccattcccgcgccttctcctccagccccagttcccggaacatccgtgccagaaccttgcgggcctccgcatgcagaaccatggtggaaaggctgcatgaatccccgatgtccgcggaagtcatccacgccgggtaactctgttcccgccagtccaggaaagatgactcccctttcaccaggccgccggtagccgcaagcacctgttcatcccgcatgcacgtcttttccagcacgcggcaggaacgggccagccagccggcgtcccccgtcaggcagtaaacctcccaggcggccattccccacaccacgcggtcagaggaaatgggccaggaaccgcccgtgccggtatcctgctccacctccccgttccgcacccgggcattcaggctcttcatgcaggcatggacattccacaaccccagccccagatgagtggcgtaggaaatatcccgggtccacacggtgggccagttggctcccgtccggaacgtcccttcttcattgagcagggagccggcctcgttaagcgccaggctgtaggccttattgagcacttcaaagcttccccggtaatgcggggcattcccggcctccggcagaacgcgccattcggaataacggccgttcttcatggtcttcacctggccgtccggctgcacctccgcccaatgcgcggcatcctggcgcacggaatttccggtcagtgtaaaggcctcaccccggtataatatgcggtcttggtccataaataagcggatgctgcatccatctttctttttaacacgggggaaaacttctgtcccgcagaaaatgaggcttacggagctttcaaggcacaaaaaaaccgggctccccgaaaacgggaagcccggcgcaagagcaaatcaactttaatgcttcaacagagaggaaacggcgtcacgttcttccttcagttcattgacggtggcgtcaatcttttcctgggagaacgcgttgatcggcaggccctgcacgatttcccagccgccgtccttggtggtgcggaccggaaaggagcagatgaggcccttttcaatgccgtaggagccatcggagcacacggccacggaataccagtcgccttccggcgtctgggtagccaggctgcggacggtatccacggcggcggaggcggcggaggcggcggaagaagcgccgcgggccttgatgatggcggcaccgcgctgctgcacggtggtgatgaaatcacccttgagccattccgtatccttgatgacttccgtcacgggcttgccgccgatcttggcgttcgtgaagtccgggtactgggtggaggaatggttgccccagatggtcatgttggtcacttccgtcacatggacgccagccttttcagcaagctggctcttggcgcggttttcatccaggcgggtcatggcgaagaaacggtcggcgggaacgccgctcgcattgtgcatggcgatcagggcattcgtattgcaggggttgcctacaaccagcacgcgcacgtccttggcggcgctgcgggcgatggcctggccctggccgatgaacaccttgccgttgatgtccagcaggtccttgcgttccataccggccttgcggggcacggagcctaccagaaggcaccagttggcgccggcgaaggcttcatccggatcagaggtgggaacgatttcattgaccagcgggaacgcggcatcacgcagttccattaccaccccttccagagcattcatggccgggggaatttccagcaggcgcaggttgatcggctggtccggtcccagcatgctgccggaagcaatacggaacagcagggaataggcaatttggccggcggctcctgtaacggtaacggtgataggtgttttcataacgttcaaattaaaataaacagatcttttctgtctggtcccggttatagcacagggaagaacggcgctcaatcaggaactttttattttgacagaaaaaatcctcttccccattatgcttgaacatcagccctgcaggccttatcctttaaatcaaccaagtttttaccatatatttgcactgataccatgaatttaacgatcatcggcagtggctacgtggggcttaccacgggcacctgttttgcggaaatgggccaccacgtcatctgtgtggacaataacgcggaaaaaatacgcaccctccaatccgggtccattcccatttacgagcccaagctggaagaactcgtgaaaaaaaacgtggccgtcggacggctggaattttccccctccattgctgattccattgcggaaagcgaagtcatcttcattgccgtgcccacgccgcccaatacggacggctccgtggacctgacctacattgaaaaagtggcgcgggaaatcgcccaggtgctgaaaccggaaatgggttacaaggtcattgtggacaaatccaccgtacccgtcaaaaccggtgaaaaagtccgccagaccatcaagcgctatgcaggaacggacgtgcaattcgacatcgtttccaaccctgaattcctgagggagggatgcgcggtggacgacctgctgcatcccgaccgcatcgtcatcggcgccaactcggaacgcgccatggacgtcatcaagcgcgtctaccagcccatccacgcgcccattctggaaacggacgtcaactctgcggagctcatcaagcacgccgccaactccttcctggccctgaaaatttcctacatcaatgccgtcgccaaggtctgcgaaaaaacgggagcggacgtggaactggtggcggaaggcatcggcatggacaagcgaatctcccgccacttcctcaacgcgggactgggctacgggggctcctgcttcccgaaggacgtcaaagccttcatcaacatcagccgcacgctgggcattcccttcaccctgctggaggaagtggaacatatcaatgacacccagcacatccacttcctggaccagatcagggaccgtctgtgggtgctcaaggataaaaaaatagccgtctggggcctggccttcaagcagaacacggacgacatccgggaatccatcgccctcaagctgtgtgaaaagctccgcagggaaggagccatcgtcaccgccacggaccccaaggccatgcacaccgccgccccaatcctggaaccgctgggcgttacgctggaggaagacatgtacgaatgcgcccgggatgcggaagtgctgatcatcgccacggaatggagcgaatacgcgaatgcggacctgcaaaagctggcggacgtcatgcgcaaccgcatcatctttgacggaaggaacatcctctctccggccaacatccgggccgttggatttgagtaccattccgtgggcaggccctccattgaagaagcctgaccgctgccgggaataattccggctccaaacgccccatttgcagaaaagcccccggagcgctgaatgctccgggggcctttgttatgtattcgctaatcctgttggccgatcaaaactcaaactgcaatcccgcgcgcaggtagaaaccgggatcgtaatggtacttctccagctcatggctcccgttgctggtcttgatggtgccggagttcccaaaggaaaaaccgacgtccgccaccagtctgggacgaacgctgccccagtgtcccaggcctacgtcggcgcccacgccggcgacgccggaaatccactcgaactggcggacgcggcggtcatggtgaatcgtccaggtgccggacaccacggaaacgaaaggcccccacgtcaggccgtcgctgaccttgttgatataggaaagccgggctccttccagttgaagggtccaattattcgttgccttccattcaaactggataaggggaaggaggggaaaatctcccagctgcggataacagccgacgccgataccatagctgaaccggtcattcaagggacctgcgagaagggcatggccgccgaaaaacaaattatgggtcgtccaggtatcgaaatccgtggaaatctgcggcgttacgccgaaaaccaggctcgtcttccccctgagcttgtaagacgctgtcacattcagccaaatcgtgtacagctcatccacatccatctcgcgcgcgccttctccgttgaaccagctcaaacgaagggcggccgtggaggaaaagccccaggaaccgctggacatccggcacaaattcaggtccgtcatccaattctgtatgttcacgctcccatgtccgtttctggaatccatggggccaagcagctcaaaataggactgcgtgggaaaaacgggcttggaggcgttctcccccgtaggagccggagagctattgtagcctccggaataagcttccgcataatagccggtatcataaccgtctgaggaatcggaatccggataaggctgggcgttcgcctgggcgaccagagtcatgccggccatgagagagaaacttgataataatcgaaggaacatgatcggaaattatatatcagtgcacactcggtcaatcaaaacatatacaaatgactaattaatattttcacgcccgaacagcagcgcgatcataatcatcacgagtacaagaagtaagtaccagcgggccgctttgctgctccggatacacgcccccgcacaaacaagagacacgacaaaacaaaccgccgccgccaaaagcatggcccgcgccagcatgggaaaatccagcgcccctgcccccgccgcaaaaagcgtccctaccacatacccggcaaatgaccacctcaaccccgccagccaggaaaaggaggctgttttttgctgactctgcttcatatattcactctgcttgcctccctccgaagctcaagtaaaaaatcggctttctccatgatatcaacaaagagaatctccctcaacacgggaatgcctcccaaaagcaataaaaaagcacgttgaaaaatagaccgggcacaagaggcgaagaccccccatatctggttttatgaactaaaaaaactccggaatactgcacctccaggatttcttctcaagataacattattcaggttccatatacggttcaacatttatttgtttttcctgactgcttcaagcctcttatcaatttgctctgttagggaaagaacagaacaagacggatccatggaaacaagggctactaccgtattaccgttcacgaaaaagagggacgactcgttgctcgacggaataattccgccaaaatcgcccaataccccctgccttcccaaactgtaatctcccagtttgaacggattgacgaccactgttgctatttcgtcatcccaagaccattgttcaggcctgtccggggttttctgaaaacgccgtgaatacagctcgttcatggccgcagactgagactggcaatagccgacaaaaagccaaatatcgctcttgtcatcgtctttcccttccgtatgaaggcgcgcaaccacgccgttttcctgttcatccaccacatccacgtctcccttcttccaaacagtcttcaaccatgcctgattgatagcaccctgatcgggattgggcaaaataaccttcttgtcgggagaaagcgaaagagatgagaaatatgtatcaaagtttttccactttaaaccttccgataaatcagattccccacgaacgctaaaaggaaactttccgggaatgccatagtcgggagcaagtttttttcgttcttcccgctgcttctcttctttttgccaacggagtttggatacttctctggccctacggtcccgctgtttgatagatcggttgaattccattaatttttcttgggctaaatcaaaatcataaacagccggcgctttcccatccagaacgagagacaatgctttaagtacaggcagcatttcacgcgtagaggcatatctcgtctttaccgtttcgggggtaacaaaagtagccggatcggtaaatcccttgaacgccaatccagcgtttttaaacgtaaaacaaagaatatcatcacctttggtcataacccagcaatcgtcgcttaacactatttccttataaatggaaggcatggaccaataattgaatgaagctccttcaaaaataatcatatcagtccgtatgccgaaaacactggtggagtatctgacatccatcgatccatttatatgtccatgttgattgcaatagagaataggattccatgaatcggaggtaacaaaaaaaataccgtttctcacttttaatccatggaggatttttttgagatcaggcgcctgatctgttaactttttacttccaaaatgaaaggaagtattttccaagtcttttagcccatgcaatcttatgctttgcatggaagatctatttttttccgcagctactgtcatcaaaggcatagactccgttgcaaataatgaaacggaagtacatgatattgtaaatagtataatcaatatatttttcatgagaactctgttttaaatattctactattaggcggaacaggtggattttctatcgtgcttttttgataggaattagaactatcaccaactactggtccggcacaggcatcataaataaatttaaacgaagaaccaaataaacttacatcgaatacgacatatgcatgattaccaaatccggtcctatactgataatagggatttgttttcagaatgactggaaccgcaagagctgcgggaaggcgaggatttttataaaaaggattattacaagaacccactcctattaaattgacagttaatatattcccaaaaggttcctgataatttccttcgacgttgattccaagcaatctaacgagagcagttagagaaaagcattggtcgtaacaattgactacattcccattgttcttctcaagataggaatccagattaatagtaccaagtgatggagtatactttggtgctcccctcaccgtatcataagtccaccccatcttgctaaaagtataattagtaatattttttatgattgaatctgatgaatttttatcaagccctatattccctgaaccttctattactacatctagcgctttaatccatggttttttcttattgtcattcatatcccacggcgatttgagtggttcactaaacaggacatacccattcctaactgttgtttcaaaaacaattgtctcgttagtaagagcagttccttgaatctctgttaatctccaagtccattgttgatttcctttattcaatttggaatcaatattatctttgaaaggaatttcaaattctgtgttgttatcaaattcctgttcatccagttctgggaggaaatttttcgaaacttttccctcaccctttgtctttaccttcgctttctttatgattccaggttttacttccgctttaatttttagatcaggttttttaccgccaatatagagaaaaggttccgatttcgttgctttgccattcttatcaaaagttgcttccgggacatctatgattttccctttataagtttttaataaatccatagcatccttgtcatgcttaccctgtacgtgattgaaacttatttgatggattaggaggcttggagttaataatttgtgtgcggcttcaagatcagtcaaatgttttttctgtccgtttttagtctcataaaaactcatcttgcattttaccgtgatcacttttccccactgttccttgttagacgaatggacagtacaagtgtcctgatctccatttttgacttccaacttttccgtaacggtccattcgtactttttctcttcgtccaattcgtatcctgcatgcggctgcggcggctccacgacaacaacagtgaattgccccttagctttatactccttgattttctctggttcaaaaatggcatatttattgctgttctcatcttctggatcctctccttctgcttcttctatagtacatatgggaagtgactgaggatccaccttgattttacctcccggctccccgctcgcccaactcgcttgcagaatcagagaacaggcaattagaacaatataataataccgcaatatactcatatgtcttttatcgattaaaatattcattcagccgtaatctcattttatttacatttgattcactgtattgctttgttccaatgataaattgtttccaatcaactttccatctatccatcattctgatttcctggggagtaaaatcaatgacattgggactgttggggaatttatagctggagcgataataagaatccttcatttgctccgttgaccatgtctcaagcatcttttgttcaaatttcttgatatcgccttcatcccagatctttagatgccacttccagttttctttcaatggaccgggaactgaagcctcattccatagtttcctaaacgtataaagcagtaatttttgggaaaggcgaagatgaaatggagaatcggcccgtttcacaaaacagttgctccaagctttcagtagattttccggaacatcagcattttttatggaagtaagttccggaggggaaggcatcctggcattctgatagccgctttccagacatgcattcagaaaaacaccaccaaaagtcgcctctttagagccatttctggaaattcttaaaaaatagaatccggcccggtccgtataaaaatttttatatactccattattcccgaaatcccggcatctcgtacggaccataacaggaagcgacatgatacgggttagttcaaggtttacaatattttccgattttttcccattcctttgaatcagaacctcctgaggcaaacgagattcgacaaaacgagcttcgatcaggtaatcccgatcatagcgtgaaatgtcattggataagggttggttgaagtagagggaaatttcatttttaccagcaggaacgcgtacaagaacccataagtctggaccatcaaaaaaggtaccgtgcatataaccctgatcactccattcggaacagggacgggtcgcatcgttgatgttgtacagacaaattcgggacgctgcattttcttcatagaatttccccgatatccaggcatctttgattttcttcctcggcccgagagttactctggcgtcatacaaatagcctcggaaatcctttcgttgatcaaaacgatgcatgatatttccccatgacttttttgccgaacgtcttaaggaaaaatggcgtccatatctgttgcaccagtcgccctgtgtttcccaatcatcacaggcaaaacaaataccataaggcctttcgccaagcggcagagattgaaactggttcaaagaattatgccatgcctgatcatctggaatggaaaaaatttttggatgtttgatttcatctccaagacgacgtcttttctttttactggctgttgtttttccaacgacccgaaacccttctccaaaaactccagctaaaacagtcccatcaggaagatcaacaaaacaactgactgtgcctcccttttttttctctgccaatttagtgttcacagaactttcatattgcatatttgccggattaagcaagatgggaacttgattgcggaagcctatccacactccttcctttacgggataaaggctcgtcacataatcttcgggaagaggcctcaatttaccttgggaagatttcataattcccttcgctttcagtttttccacggcatccattccccggataaaaatctctttgtcaccgcgttttattcccagtcctgacgttgtgcccacaaatacggaattaccattggcagccatggtattgcacaaatttgacggcagccctgcaccgaaaagaaccggaggttgcgaaagcttgcgtgcatcatccgaatgccattttgactgaaaaaactcacaggtcttgtattcatccttaagagtcatccgggccattcctgccgttaagaagcctacccacaaatctcccgacctatcaaaggctagtgctgaaacttgatcttcaggcaagccatcggcccgcgtgacatccttccatgaatccgtcaaaggggaataaatagcaatgcctcccgaggttgctacggcaacatcccctgttgcagaagagacgctaatgtcaaaaacacggccacccggcaatgtcgtcttacgggtgtatgttttccattgtttgccattccaaatacacactccccaacggtctgttcccacccatattcttccctgggcatcttcagccagggcatagaaattttcagtatctggaaaatctgccgctgttcctgcctttttccagacctttttatccagctccaagtagaataatccctcaccctgggttgaagcccataaaatacctgaagaatccactaaagcatccgttatcctgcttccgggacaaggaggaaggttggagaaattttccaccccaagagagaaggaacataatgcaagcaaagttgagaccattaatcccaatagcttcagaaatgccgtgaatctcatattcatcggatgaaattctactaatttctacaacaaaaaactaaaatagggcttatcagcaacagtagttcttctgatatttgctattatgtggaaatcaaattaaaaagtcaaaaattatttccctccttattttggaatattcaagactctccctggtttttcccattactgggagtaaaaagtggtcgggaagacaggattcgaacctgcgacatcctgctcccaaagcaggcgctccaccaggctgagctacttcccgtataaaaaagggattaaaaaattgggagaaaaaaatggtggctcgggacgggatcgaaccgccgacacggggattttcaatcccctgctctaccgactgagctaccgagccacttgcttgcacgcagaacgtgtttgcggggcagaatctagcaccgcatctccggtattgcaaccacaaaatatcatttttccaattttcctgcgttttgccgtgtccggcccaaggaagttcttccctgtcaatcaggaggaagcctgagccagaataccgctcagcaacagcggaaagatcagcgccacccaggagagggtgtacagcaggagagggggcatgttctttttcaacctgtccagcacgaacatgaatacccccgccatggccagcccgtaatagatccacgcgtcaccggtgtattcccgggcggcggcggccaggcagaagacgacgtagatcacaatcacccccatccagaccagggaaaccatgtcccgggcggcggagtcctgcccgtcttcctcctcttcttcattccaccgtttgcggctgaacatgctgaggatgaccagagcgacgagataccaggtgggcgtggacagctggccgccccagcctccgcccatcgttccatagaagtaggcagggattcccgctcccgtagaaaaggagacggcggcaaagaatgatgccatgacgaatccggaggacaggctcccctttttgtgcggattggaggaaaagtagaggaagagcaggctgcaaatacccggaagcagggcaaactggaagatgaccacgcccagttggaagaacatgatccacagccccgtcacggccgccaccacaatgagcagggagatgacgaagcagtgctttttggcaaacagcaggcattcatccgagtatgccgcagggcctccccggaatattttaagcacccggtccagcatgttgacgcaccagacggccacaaagaggaattggtacagccagggggtggagactaccaccagatgggactggctgacggcaaaagcccatgcaatggctgcagaaggaatctccagtcccatcagggaaaaccacgcccaccaggggggtctcttcagcacctgctccattttccgttacatcatccccataaccgttcctcccgcaagctcccgaaccgtcattcacaaacttccgcatttttatgcggggatgcttgacatgcaataaaacactcctatactggtgctccccttgcgtcggaaacgcaatacatcaccatgaagaaagatattcatccccagtacaatccggtcgtttttgtcgacatcaccaccggacgccgcttcatcacccattccaccgttcgctcccccaagacggaagttattgacggggttgaacatttcgtggtttcctgcggcatcacctccgactcccacccgttcttcaccggcaagaaccagttcgtggacacggaaggccgcatcgacaagttccagaagcgtttcggcgccgtccgccgcagcggcggcaagcccaagctcaacaagtaaggcttgtccccaacagttttccaaccccgtttcctttccggaaagcggggttttttatttgcaggcttctctttgcccctttttcctgcttcactggcggcagcatgacgttgacaccagaccattttgacaagcagtctgcggagcttctccgctccggccgtcccgtccttgccggaatcagcggcggacgggattccatggcgctgctttccctgctttcccaaatgccggggtgccacctcattgcctgccacgtaaatcacgggctgcgcccggaggcggaggaggaggcacagttcgtatgccaatacgccgcctgcctgggggttccctgtgtccgggaacgggcggacgtccgcggcatggcccgttcacgtggaatttccattgaagaagcggcgcgggatgcccggcaggccttgttcctgaaatgggctgccggctatccgggggctttcgtggccctggcccaccaccggaacgaccagcaggagacagcccttctccacctgtgccgcggggcttccggcattcacggcatgtcacccgtttccacctgggccaacggattgactgtcgtacgccccctgctggatttttcccggaaggatattaccgcctacctggagcatcgccatattccatggcgggaggattccagcaaccagtctgcagagtataccaggaacgccctgcgccatgaggtcattcccaggctggacacgctgttccagcgagacaccagcctttccttttcacgcgcctgccgcattgagaaccaaatccgcacggcgctttcccaggcgctggattccatgaatctggcagacccccaggggcgcctgttcctgcccaaggtcaaccagcttcccgcggagctgaggcaatgcgccgtgcatgattacctgcgccggcagcatattccggacctgacggaggacgccgtgctccgggtgatgagcattctggatacggacggtccttcccggacttccctgcccggcggcaagctggccgtacgcaaggagaagcgcctgatggtcacggatgcgccgcgcccaatcaataaaggggagcaaccccctgcgggtacagcaggtggaatttaatggcttcattccccaccaccagagcggtgccgaacatcctgtcttcatccgtcagccgcgggagctgggcaatcgggaagagcagccctcccagaatgaggccgtagttgtatacggacggcatcatgcagagcagctttttggagatgtccgcggcgtccagggtcgggaagacccacacgtcactgggctgaagcatggagttgcggtgaacgcgcacgctgtaggagtccggggacagggcggcgtcaatctggatttccccttccacggagatttcattgttcaggcagtccttctgcaccatgctccgggccagcgcggtagcggccctggtgcggtctgcagccagttccggcacggacccggcggtggaggcgctcaacatggcgacgcgaacgcttttgccgagcatgtggcgggccattttggccgtttccacggcaaagtaggccatgttttccacggtgggatcaggggtcaccccggtatccgccaggaagtagatgccgcggccgccagattttttggcaaattcgggaacgagaacgatcgagatggcaaagaggggcttggtaggaacgggttcctgccggtatttgttcacggcgcggaagacggaagccacccttttcatgttcccggccacaatggcgtccgcctggccgtaaagcaccatcatggcggcaaagtggaccggctcggagacgatttcacgggtgttcatgggcaatccgttgccgaacatttgttccgcccgttcatagcggtcgcagaacatttgaaggtccgagcttttttccggctcaatgatgcggacgaatttcagggaaattccgttcatttccgccatcctcctgatgacttccttcctgcccagcaggatgggcacgcctgcctgttccgccacgaagcgttcggacacgcgcagcacgcgaacatcctccccttccgggaaaacgatgcgcttgggatgacgcttcaggttgtccaggagcggtcctgtaaaatcattcagcggggaaaagccttgccaatcactcatatgtcacgtgtcctatttaacgcgactctaaaaaatcctgtccataaaatcaacccataatgtcaaagacggcaaataatcggcaaatacgtcctccgggttgaaccgcccgcgccgccgtgctaacatgggcattcctccatgtactgcgattaccatacccatacccccctgtgcctgcacgcctccggcactccgcaggaatatgtgcaggcagccgtccgcgccggcctccgggaatacggcatttcagatcacgccccaatgcccggggagccttttgacgactggcgcatgaagcaggcggacatgccggcctatctggactggctcacggaggcccgggaatgcgccgcaccgcaccgcctgacggtccgcgccgcgctggaatgcgactggtttcccggcattgggccatggatagagcacttgcagagcctgcacgcatgggattacctgatcgggtccgtccattatctgggggagaaggaggagtttgacaatccctacaagatggatttctggaaccggacggatgtggaggacgcatggaggcagtattgggaacgcttccgggacatggcggcttcaggcctgttccacatcatgggccatgcagacctgatcaagaagttcggcttccgcccttccggagatttgcgtccttattacgaaccgtctctggaagccatgaaggagtccggcgcctgtctggagcttaataccgccggctggcgcaacaagtgcgccgaacagtatccggacgcgcagtttttaaagatggcggcggagatgaatattcccctcaccatcagctcagacgcccacaagccggaggacgtgggccgggattttgagcgcgctgcggaactggcccgccagacgggcttcacgcatctggcctccttccaggagggccgcatggagctgtatcccctgcccggaatctgaccttcccctttcctctgcgggaagggaatgcttcccggggccgcggcgtctgccgcctgggcagcccgtgccttgagttttctgttccggcagcccgtttgctgcggaggctgacgcacgatttccggaagaagaggaggaacccgcggacgcactttcaaccaccgtacaagccaggcttcacaggcaaaggcattggacgcggtggaacggggcggggagggacgggatggggccttggcggcaggggggaaggccggataatgacgggcggcggcggatagttccacgtcctgataatcggagggacaatgatgcgctccgttctcggctggctggccacctcccttacttccccctgcaactgggagacctgcttgttcaagtccgcaattttcttctgggttccgtccttcagagccaggtatttcttttccaaatcctgccagtactgttcggcggtctccctttttttacggatggcgttcacctgttcctgataggttcccatcctcgcacggaagatacgggcatcctccggcagtcccacgcggtccgcttccagggcattccattgcagggccatgacttccgcctccacctgggagagttcccccagcagcagaaacatgcgggagatatccgctccttccagataacggggatgccgctccgcttcagacagggattccctgattttcctggcttcttcatcagccgcctttctggcctcttccgcctttttcctgcgcgccgcgtcctccaggcgccgctggtccagcctggttttcacgtcctccggcgtcatcctgtaatccttctgctgggcatccgtgagctccttgtaggagaccttggccaccccgtccgtgtactggacgctgacaaagtcgtctccggaagacaccacgctggcgtcttccagcaccctgccggaccgcagggtcatattttccgccagggccgcaggcagcagggcgcacaacatcaaaaaacaggttccaggcttcatatgattctcctcttctacgttggtaagaggcgtggggaaagaaatttattcaaaaaaaatagaaccagaggttaatactggcgccgcggcccggttttcgctagcatcacgcgagtcatttacacgtgttatgagtctctattcttcatcctggtcccctttaccctctcttcccgatccggaaggtttcgccggcatgtatgccggaacatgcggagaaacaatgatttgtgccggcggcaccaatttcccggacaaacccatgcttgaaggcggcgccaaaacgtggacggaccgcattttcacgctgtctccgggggagaatgggtggacggaggcaggaacgctccccgcgccttacgcgtacggagcctccgccagcaccagggaaggcctgctgtgcatcggcggctgcggcaaggaaggccaccggaaggacgtttacctgctgagcactgcggacggagccgtcactgtgactcccttccctccccttcccatagccctggcttacacggccgccgccgttctgggcggcaaggtttatcttacgggaggctgtgagcgccccggggagcaggactgcaccaaccgggttttcatgctggacgcacgcgggccggaacagggctggcaggagctggacccgctgccgggccgcggacgcttcctgcaccagatggccgcggcggacggcgtcctttacgtgctcggcggcatcggcctccgggaggaggatggcaaacaggcccgggaattgctgacggaagcctggagcttcacgccggaacgcggatggacgcgcctgccggagatgccttacgccatcgccgcggcccccaccccggccccggtttcccggaacggcgtgatttatttgctgggcggggacgacggctccggaaagaagtataccccgcagaccaaccccggcttcaacaaccagtccctgtgcctggatacagccgccatggaatggcacgacgcagggcccatcgcggcgcccagggcggtccttccgtgctgcgcgtggcagggccgttttgcagccgtgaacggagaacttaaacccggcaggcgctcccctgaagtgtggagcatcaccctttcctgatttttcacccacatcccatccctatcttccagcatatgcacatttcacgtcaccttacccggttttccagggcatgcggctccgctttcgccgccctgctgctgatggcggcccccgctgccaacgcctctttttccgtggatgtacacccggccggagccattcccgacctgccggacccggcgggccgcgctggaatggcggctggaaccgttacggaaagtgacggcacccagtccatcatcgccgcaggcggcgccaatttcccccaggccgctccgggagcctcaacgccggaagaacgcgggcctaaggcgtaccaccaggatattttcaaactccgcaacggccaatggagcaaggcggggacgctgcccgctccgctgggttacgcggcttttgcaagcgtaggcaaggggctggcggtagccggaggccataatgcggaaggcatcctgaaagacgccctgctgatcaaggcggacggctccgtggaaaagcttcctccccttcccgtccccgttacggaagccgccttcgctgctcacggaaacaagctgttcgtcatcggcggacgggacagcgaccagccggaagccgccctcaatactatctatatgctggacaccactccggatacggccaaaatgaaatgggcgtccctcccgcccttccccggtgcgggccgcatcctctccaccgccgccgtctgtgacagcaccctgttcatcgcaggcggctgcaccctgtccagggatgccgccggagaaaccgccagaacgtacctttccgacatgatcggctacgacatgacgtccaacgatcccgccgaatggggagccgcgggcaaacagcagcctgccggaccgggaacgcccgtagccgccgccgcaggccccgccccggtacgtgaaaattccatcatcctcatcggcggggacaagcgcggcaatgcgccggacccgtccaagcccgtggtgcagtcccgcgacatcctggtttatgacgtcatcggaaacaaatggacgcaccagggggagtggcccgtcggcatcgccaccgcgcccgccgtcgtgaagggttccgagatcatgaccatcagcggggaaaccgccccgggcgtccggacccccgtgaacgcctccgcctccgcagggtaccattttgaaatgagcacggttgattacgccgttctcatcctgaccgtcatcgtcatggcgatcatcatcgtttccgccgtgcgcaacggcgttaaaaatgtttctgccgtcacggacccgaacaccaggccgggcctgtgggcctgggtggccgtcatcgtcctgtggttcgtggtcatgctgaactattttgaccgccagctcctttccgcgctgcatgaacccatcgtccgggacattccgcagacggaagcccagttcggcatggttacctccgtcttcctgctgatttacgccctgctcagcccggtgggcggcttcctggcggaccgctacagccgccgcctgatgattctctgctccctcgtcgtctggtccgtggttacctggtggaccggccatgcggaggattacacgtccctgctcatcgcgcgcggcgccatgggcatcagtgaggccttttacatccccgccgccctggccctgattacggactaccaccggggcagcacgcgctccatcgccacggggctgcacatgagcggcatttacgtgggcatggccgtggccggcttcggggccaccatggcttcatggacgggctggcgcatgacgttcgccctgttcggcctgatcggcgtggcgtatgccatcgtcctcatcctgttcctgaaagacccggccaaggcccctgcggatacggcgcaggccaaaaagccgtccgaacccaaggaaaaaacggtcctgatcaatgtggacaatgacgaacgggccatcaaggaacccgcgtccaatctttccaccggcgccgtgctttccagcctgctgagcggccgccccatgtggatgctgctggccgtggtcgcctttgcaggcgccgggaactggttcctgctcacctggtaccccaccctgcttcaggataaataccagctttcctccgcggaggcaggccccgccgccaccctgtggagctccgtagccaagtacgtggccgtgctgggcggcgccattctggcggacatgtggtaccggcgcaacgcccgcgcccgcgccctggtgcccggcatcaccttcaccatatccggcccgctggtggtcctggctctgctgcccggcatcttcggctgggacattgcggttcccctcgtgctcatgctgggcctcgtcgccacgcaggggctggcgcagggatcgctggacgccaccctcatgcctgtgctacgctcccatatcgacgagcgttattccgccaccggctatggcctcctcaacctaacgtccgcgggcgtgggcgcccttatctccttcttcgggggatggttcaaggaccagggcgttccgctgaccaccaccctggcggcggcaggatgcctgatgctgctctgcggactgctgctcctgatgctgccgcgtcccaaacattaacagcaaccttctttcatatccccaaccccagccttatgaagaatcccgcatgcctgtacctggtgacgggagccctgtgctccctctccttccttcccctcgcgcaggggcgcacctggaccagcgtccaggggaaaagcctggaagccgagttcgtcaggctggacggccagaaagccgtgctgaaacgctccggcggccaaaccgtctccatccccctcgcccagctttcccgggaagacagagatttcatcgcggcccggggaaagggaggggctgcctcctccaatcccgcggacaattaccacctgccatggcccaggaccgtcaaatgccaggacaatttcaaggtggaaaccatcaaggaggaacaaggggagtatatttatgaaacgccccatttccgcttcatctgcgacgcaaagctgggcgccggcatgatcaagcgcctgggccttctcttcgaggccacccacctggcgaacaaaacgcttcccatcggcaacatcccccctcacgacgattccgccaaattccccgcctacctgtacgaaaagttcagcacgtacctggaaaacggaggccgtgaaggcacggcaggcattttcctggggacgacgcgcagcggagaccgcggcaaaatcctggtcccgtttgattccctgggcgtcaagaccatggggagcacgtacatcattgaccgcgacaaggattcctccaccctcatccatgaactgacgcaccagctcatgtccccggaggccaagcaggcaagctggttctgtgaaggctccgcggaatacatggggatgaccccgtattccggaggccgcttcaacttcggggccaaccgttcccacattgtctcccgcgtgacggaatacggcaagaaaaatacggggggccgcgccctgggggacgactttgaggcgcccagcctggagtcctacatgaacatgccctattcccagttcacgggagagaacgccaacctgaattacggcctggccgccctgatggcctactatttctaccacatggacggcaagggggacgcccagcgcgtgaagaactacatgaaggccatccagtccggcagcagtgaaaaagaagcgcaaaagctcctccttgatggccggagctatgaggagctggccaaggagattgaacagaaatggcgcaaggccggcgttaaaatccgcttccgctcctcctcctgacccgcgccgcgcatgcggaaagacgcttccgtcaatggccggaggacagtctgtgccctgaaaaaccgttgacatggcagggaaaggcggcacactttccaccagcaggggctatcagacacgcatggcagaagacgcttccataaccgccctgatggacagggtggcccgcaccgcaccctttcaccgggaactcgcgaaactgggcacggaggaacaggcggttttcgaccatacctccctgcccggggttccgttcgtggcggccctgtgcatcaggaccattccggacaccgcccgggcctgggtgatcgcgccccatctgcgcgcgcaggaatcccttgccgcgcaactggaaacatggggagtgcgcaacatcctcttcgtcccggaaaaagaggtggccctgggggaggaagtgggagacccggagcttgccgcggaacggctgaacgtccttcaccgcatcgcttccggccatgtgggcaggcaaaccgtcgttctgacggaaggcagcctgaatgacgaggttccctcccccgacggcatgcagaaccagggaatgaccctgaaaacgggagaaacgcacgcccctgacgatttgatacggctgtttgaggaggcggggttcgagggcgttcctcaggtcatttcccgcgggcagtggtcccgccgcggcggcattctggacgttttcccgctccagtcctcccatcccgtacgcctggagttttttgacgacgagattgaatccatccgggaatttgacgtggactcccagatttccttccggaagacggagcacgtcaacctcgtcctgacggaagcggcgggcgtggaaaccctgcgggcctggatcaagccgggcgacctggtcattacggcccctttctgcaaggaacgggggaacgtgtgcatcctcaccgcaccgccggagaacgcggagggggaggaggacttctccctggccatccatgacaatcccctgggcagctttgacgccggggacttcgtgatgcaggagatgcggcgggagctggcggaacgccagatccgagaatggctggaccggaaatggaacgtcagcatgttttttcccaacgaaggggaggaagagcgcttccgggacatctgcgccggaacgcccgcgctgctgtccatcaccgccctgcgcggggacctgcccggcggcttcagcattccgggggcaaaaacggccgttctctcctcctcggagctgttcggcaggtaccagtccgccacggcgcgccgccgcgccagccgggaggacaaggcccgcaaggcccgcgcgcaggcctccctgaaggacatcaaccccggagacctggtggtgcacaccagctacggcatcggcaaattcatcaacatttccacctctccggactccggagacgaggaaatgaacatcctttaccgggacaatacgatcctgcacgtccccctcagccaggcgcacctggtttcacggtacatagggctgggcagcaagacgccggaactcaacaagctgggggattccaaatggcagcgcgccaaaaaatccgcggaacgctccgtggcggactacgccgcccagctcctcaacgtgcaggcggaacgccagacaggaaagggctacagccaccctccggacagcaaatggatgtgggagtttgaaagctccttccccttccgggagacccaggaccagctccgcgccatcgcccagacgaaggcggacatggaagccacccgccccatggaccgcctgatctgcggggacgtgggcttcggcaagacggaggtggccatccgcgccgccttcaaatgcgtgacgggaggccgccaggtggccgtgctggtgcccaccaccgtgctcgcggaacagcacttccgcaccttcaaggagcgcatgagcgaataccccgtgcggattgaaatgctcagccgcttcagcagcgcggcggacgtccgctccacgctggaagggcttaagtccggggccgtggacatcgtcatcggcacgcaccgcctcatctccgaggacgtgtccattaaaaacctgggcctggtggtgattgacgaggaacagcgcttcggcgtcaggcacaaggagaaattcaaggaacgcttcaagggcattgacgtgctcacgctgtccgccacgcccattccccgcaccctgtacattgcgctgatgggagcgagggacatgagctccattgaaacgccgcccgtcaaccggcagcccgtgcagacgagcgtatgcccctatgacgaacgcatcatgaagaaggccatggagcgcgaactggaacgcggcggccagattttcctgctgcacaaccgcgtcaaaaccatcgaactgttccgggaccgcatccaggccctggtgcccaaggcccgcatcgtcatcggccacggacagatgcccaaggacgagctggagaaggtcatgcgcaccttcgtgcaggggaaggcggacatcctgctggcaaccaccatcatcgaatccggcatcgacatcccgaacgccaacaccatcatcattgaccgcgcggaccgcttcggcctggcggacctctaccagctccgcggccgcgtgggccgcgcagggcaccgggcctacgcctacctcatgctccccaggtccgccgccaccacgggagacgcccgcaagcgcgtctccgccatcaagcagtacacggagctgggttccggcttcaagatagccatgagggacctggaaatacgcggcgcgggcaacctgctgggcacccagcagagcggccacattgccgctatcggctttgacctgtactgccagcttctccagcagtccatcgcccacatgcagggcaggcacacggccccccggccggacgcggccctgagaacggatttcatcgtgaacagcgagacgcagttcgccgccaaatcccgcaaggattatctgggcgccttcctgccccgggattacatcagcgacgcagccctgcgcatttccgcgtacaaggacctggcggcagtccgcaccctgaaggaggcggacgccctgctccgcgcgtgggaagaccgcttcggccctgcaccggaaacggtgcatcacctgctggattcccacaaaatcaagatactggcctccaaagcaaacatctccatggtggaaatcagcggacagcgcctgatgctcaccaggaacggggattttatcctgctgtccaacaaatttccgcggctggcaggcgtctctcccgcagacaagctacgggaagcgctggaaatgctgaagaacatctaaaccgcgccacagccttcccggccgggccatccagtggaaacaggaaggccccggcgccggggccttccgccccgaacggcttccgataacggacggaaaccgcatgccgcgttctctcctttcccgtggtaaaatccttccatcaaattcgcagctcttccgcgccggaaaactccttcttcctcatcatttccatgatgccggacgtattggccggagccatgatgacctctatcgaccattcggaactgtccatttcctttgcgtaatcctccatgtttatggagacctccaggacgggagactcccgggtaagggccgtacggaaagaacgggacatgacctcctgcccgttccgcaacagaatcaccttgtcaataaggatacttcccccttccacggaggtccgtaccagccgcagtcctgaaaattggctcatcttcctgccgggaatggagcagcgcatcctcgtataggtttcctccttctgccccagaagctcccaatgggataaaatgggggccgacaaggtaagccgcgacaggtcgtaaccggaaccggccaacagcctggacaggcgcgcgaccatctccgcggaatattccaccccccacccctgggaatacaagacacccagcatatacagcacggaaggatcctgcgcggcaaaggacatcagaaggaaatcaaccgcctgagaatagttctgggacaggctgaccgggcactgaagcatatccgggaaaaattccttgccccccacaagaagaaacgccagatccctctgcgccacaataaagccccccatggccgccttataaagccaggcgcctccttcctctccgtatctcccatcccgttcaaagatgagacgggctattttatactgggcggcgggataccccgccttggcgaacttccgcacctgcgtcttctcctgttccgtcagcacgatggaatcaatttccgtacggttccttttccgggaggcgatgagcatttcccggatcctgccgttttccggcctgttcagcgaatctctcacctcggagtcatccatcgcgcaaatgaatttaaaatggggcctcacggttttcccgctctccagcgtcgtaacctgggaagaaacaaccttcagcggatgaggaacattatccttggtttcaaaactgaacctgtaaggcgcatccacattcagcgccggaagatccacaaagcggaacccggtgagcacaggactctcgatcaaggtgaaggaaaagccgttgagagaccgggaaaccagctttccctcctcatcacgtatggtcaaatacaggggcgggcacatcttgtcttcctgaagcaccctcaaatggacacacgccaaggaaaagcggtcgggaagcagggatggaagagcatggcgcgacaaagacggactatccagcctgacgtcaaaacgttccacgggactcagcaaggaaacgcccctggattctgaaataatctggggaatgggggtggacattacactgggaaagcgaagccctaaagcatcgtcctcctccgggccgcctccccagtcataaacaaaatagccgagggttgcgccaatcacgcccgcaacaacgaagagccccagcaccttcctccatccggccccccacttttcgtgcccttccgacatgatgcgggaagaggacaaggcaaacagattgaaaaaacgcttacgggcggacttgaactcctcactggagaacttaatggttgagagcgcccctccttccactcccagatccttcatccactcttccgcggagttataacgatcttccacccgaggagaaagggccttgtctatggtcctgagaaaatttttcgaataatgggaggacaagggcgcggacaattccaaaggctgtatggtatcgtggatcagccgctcctctcctctggggggcgcaccccccttcagcagggaatagaacgtagcgcccagggaataaatgtcgctccagggtcccgtgtttttcctgccgagagcctgttccggagaagaaaagccatgagtcgccaggacggtctgggtatgggtgctctccatgtggcgcgacgcgccgaaatccacgaaaacgggcgttccctcctgtgtaagcaatatatttcccggtttgatgtccctgtggcagatgccttttttatgaaggtaatccaaaatctggaggatgtgcatcagcaatcccttcaacttggcttccgaataaaagtttccggcaagcagctgctgttctcccaggtaatccagaggaagcccctgaacataatccatggaaaaataagccgtaccgttgcactcaaaaacggaaagaacccggacaatacctggagaatccagcctcgcaagaatgcgggcttcattcaaaaagttggaaagggtccacttgaaatactcggcgtcatgctcattattgggaaccacgcgccccgtaaacggatctctgtaagcataggaagaaggaaaattctcttttaaaaccactttcctcttcagcatcaagtcccggaccagataggtaatgccgaatccgccgcttcccagcaccttcaatattttataatgctccaacgtcgctccgtccgggagttctttggaataaacggaaaactcgttccaggaagagggaggtgtcaatttggatccatgcacggaaacattattcaaatgagcatcttttcccggaactgccgcatggtgaaaatcgggaacactatttgagccgcaactctccatcctaatatctgatcaggaaattacttttatcttttccatctaatttgtaaagattattcttttgccgctcaccgggttggttatttctccataacctcttgcacgggaaacaagacatccgccatttttcatcttcatgaacagctcacggcttccacggatttaacggagaaccacccggcattcacgcagggagggccttttcccccattccggaaagtagatgcgctggttgccgcccttccaaaacatacttttgcaataaacgggccaagatggacgtattctgacaaagatatgattgtaaaatctctcattattttcagcaatatggcaggatgcctcctgcccggttccggacaggcgggagaattgcatgcctctctgcaatccccggacggccgtctgtcctggatgctccacgcggataaccggaccgcccattccctgaaaaagggaaacaggacggttctggagccctccggcctgggcatcgtggtgaacggcaaggaccttgccggaggcattacgggatggagcgtggaaaaagtgaaggacaacatccgcgacacctttgaaacgcgcggcaaatacccctccgcttccgtccattttaacgaatacgtggtttccggggataattccggcctccgcctccgcgcccgcgttttcaacaacggagtcgccttccgctacgagtggacggaagacgtgcaaaaagcgcccgtgctgaacatcggggaagaaaaaacgtcgttcgccttcccggaaaaagccgtcctgtggacccaggacgccgcttccgcactgggtccctgcgagggagtctggtctccttccagaatagccgatttcaagaaagaccccggcaatccccgcagccatgtccgcaccatgccgattgcggcggaactgccgggcggaggcttcgccctcatccaggaagccgccaatttcaacaggcagtggagcggcattaaattctcccttcaggacggcgcatgcaggacggtatatttccaggacccggaaggcttttccgccccctcttccgcagagatgccctggcgggtcatcctggtgaacgacgacctcaacggcctggtccggaacgacgtcatcccttccctggctccggaaccggacaggaacctttttccggaaggagccaaaacgccctggatcaagccgggccgctccacctggacctggtgggaccgcggaaacgtccgtgaagaggaccagtacgcctttgtcgacatggcctccgaattcggctgggaataccacctcgttgacgaaggatggaagaaatggggcaaaaccgtgccggaaagcatggacaaggtggctcaactggccagctacgccgccggcaaacaagtaggcatctgggtatgggtgcgctggtcagacgtcaacaaccccgccaacgactgggaaagcatgcgcagctttttcagaagccttgccaaaacgggcatcaagggaatcaagatagacttcatggattccgcctcccgggaacgcctggccttttatgacgccgtcgcggaaaacctggctaaaaacaagctcatggtcaactttcacggcgccaatacccccacgggggaagaacgctcctggccgcatgaaatgagccgggaaggcatctacggcggggaacagaacatctgggccgccatcggcggacggcactactgcgcactgcccttcacccggctggtctccggccacgctgatttcactggcggctacttcggccacgggcccaagctgcgcggctcttcctggcccctccagatggcggccaatatcatttatacgtcccccgttctccactgggtatccaaccccgcagacatggaagccgccttcccgaaaggctccccggaacgggaagccgtccggaacattccctccgtatgggatgagactatcgtcctgccgccgtccgccatcggggaatgcgccgcctttgcccggcgttccggggaccagtggtacattgccctgatgaacggggacggacgggaacgcaccgtttccattcccctggacttcctgaacaggaacaccgcgtaccgggccaccatcctccgcgacctgccggaaaagaacgacggctggaaggtggaaaaccgggaactccattccggaagcaccctttccttcaccatgcgcgtcaagggcggcggcattgcccgcctggttcccgcgccttccggcgactaaacgatactcagtaacaacctttcctattgggaattgtatagttaattccgatgcttaataagcaatagatcacctaaagaacgtctttgagagttttttttttaactctatttttaagcaataattgttccttttcatctaaaggagattcattcgtggcttgtccaactacaatagatggctgaacattatctatatgataacggaaaagtgccaaaaatggagagaatatattagaaaaaattctccatatcttgctgcaattgtgttgtatctattcttttcaatgatgaagtatgagtactttcatatacaatagcaccaaaccaagacttttgctttatagtttgtttcaagcgatgggctatatacactgtacttcttaatttcatactggctacatcacgaggatgatgatccaattctttataatgataaagatagtaatccaaatttcttgattttaaaagttcctcacagttttctgggagataaattttgtttaattcgtcggcattaggagagaaatctttggtatatggagaacaagacagcccggattgtttaaatagttcacatagacgatctgtgtttgttttttcatcccataattcaagattatatttcttaatcatttgatttttcggcctcagcacaaagggatgctcttcggtttttgactgaatccctttttcataggttttaagatgttcttttttgagcttttcatcataagaacctctagccaaacatttatatttattttttaattctccatcatcttttaattttatataaaaagaaaatctttcttgaactccattagaaatctcataattctcatttttatcacaatacaattctgtaagagaatgcagggcttttctcaataactcttcgtatctttctattaaagatttgtttagttttatagaatttaatggtattatatgatcgtaccaaaatcttctaatgaagtcgcagatataattagtgtgtttctggtaaagtaaaaactctttatccaatttctcaaattcattcaaggtatcatttgattttctccattcacaaatcaaattaatgagcatacaaagaaaacaaacaccagctaaaattgaaatcgcagtagaaaatttatctgcgatagcgagtaatgtagaagcaacagacgcaaaaaaacaacttatagcactgagttttcgctcttctataaattggaaaaagttttcctttgaagccatagaaatctctccaccttttcttaaattactttataagaaataagtttcaaatcatgagagaaataaaacactacacgagatacagtccttccaacggctctataggcatcaatgagtaaatcggcagttacactaaaatccaaagctttgcaaaaaccatcaataactttagataactcttccgctggtaaaggcctctctgtatccttaaaaataaattcacaagaatccaactcccaaaggagtgagtctttctgttgtacattcttattcattttgattctatcgaatatcattgatgatgttctctcaaagtctgtaatagtacttgacccttaggatacgcatcacgtttaaaatgtgaagtcaaaaaatgtctttcacaaaattatcataattattcacacgttctcaaaaagtgaaagatatcctctccattgtatatttgtgatttatggtaaaccttcaatgactttctcaacagctataaaaaatctgtcatcttctcagatttcgtgaattgtttcctataacgaatttctcaacttatttccttttgagtcagcgctcggacaaattaattgaaaatcttactttacatatagaagctgaaaaccacgaggaaaccgaaaaaaggtcaatccgtgctggatttcccggaggcttcttctacttccttcagagtgctccacgccgggagccactgaacgttccggaggcgggagccgcgcttcaccagttcccggtgcaagccggggaggtgggccgccccgtaaaagatgcctattttgcgcacgttccggccaccccactggtcaaacacttccatgcatttggcattccgcccttccagaatcacggtattctccaggtcctccggggcattggcaaaaatgcgcatcagttcatttttcagcccctttttatttccggaaagcaaatccagcatcaggccgaattcattaggctggtacgcgcggggcttctccaccagggaagacaaaaaggatttgagcatcagtccggcaaagctttcccccttcctggcctgtgccagccggaactcctccagcgtcatgtccgcatggacaaaacggggcgcggaatagtcaatgctctggtactgggtctgcaagcccaccgtatcactcaatttctgataaacgctgcccagcagccccagcaggaaggatttttcctcctcagcgctttttctcctccattccacgatccggttccattcacgcgcctcttccagcgtcaggccgcccagcggcttgctgcggtccagcttgcggcgcagttcctgctcccgctgcaacccctctccgccaatcatttcaaacagcaccacatcatacccgctgaacagcttgttcaggcgcgcatagtaggccgcctccgccacatgaatggctccgatgagcgccacttccctgccttccccgtccacataggaggccacgggcgtggacaggctctgccggtcgcgggaggatgattccagcagcatgtactttgcggggtacgcaccccgctcctctttttccgcaccgggggagtgcgccgcaagcacgggagagcaccacagaaaaacagccggaaggcaacgcagcatcttcatacatcatcagcctagccggagccgcacgcagagcaagcccaaaaagggactgccccgcctttacccgcggcagccggcaggcaaaaaattccccgcacccggagacgggaacggggaatgaagggattgattcaaggctgccaggcggaaaaacgctccacagcctgttaacgggctacttctggcagcagcagccgcacttgtccgtcagggcgcccacgccggggagcaccttgccttccagcagttccagggaagcgccgccgcccgtagagcagaaggaaagcttgtcctggaccttgaacttcttggccgccgtcacggaatcgccgccgcccacgatggagatggcggaggaatccgccagggcttccgcaatttccttggtgcccttggcaaagcagtccatttcaaacacgcccatcgggccgttccacagaacggtcttggcgtccttgatgatggcggagaattcttcaatagccttgtcgccgatgtcgatggccatgccgccttccggcaccttgccgccttccgcgaagggagccgtgcagaaggtttcagcgccgtcttcaaacttcatggctacgcgcacgtccgcaggaagcaggaatttcacgcccttggccttggcttccgccaggatttcacgggccagatccagcttgtcgccttcaatcttggaagcgcccaggtcatacccttcagccgccaggaacgtgttggccatggcgcccccgatcaggaacgtatcagccttttccatcagcttggaaagcacttcaatcttgtcggacaccttggcgccgcccatgattaccacgaagggcttttccgggttttccagcttgccttccaggtattccagttcgcgttcgatcaggaagcccatggcgctcttttccgcaaaatgcgtcaccccttccgtggaagcgtgggcgcggtgggcggtgccgaacgcgtcgttcacgaacagcgtggcattgcccagaagagccttggcaaattccggatcgttcttcttttcaccgggatagaagcggacgttttccagcaggaccacgtcgccgtccttcatggcggcgcgggcggcttccgattccgggccgatggcggcgggaacgaatttcacttccttgccgagcagttcggaaaggcggacggcaacgggcttcagggaaaaagcgggatcgggttcgttcttgggacggcccagatgggaggtgaggacaaggcgggcgccctggtccagcaggaacttgatggtggggagggcggccacgatgcgggcgtcattggtaatttccccatccttgagggggacgttgaaatccacgcgcatcaggacttcctttcccttggcatcaaggtcacgtacagtaagtttagccatatcggtttatattgtttggttcaatggaataaaaaagggagggcatttctgccctcccggataaatccccggccgcctggacaaacccggttcaggaaccggaaggttgaagcaggcaaccggcaagacttgtcgtgcaactgaagagcaagcgttgttcggaagaacttacttgccgcaggagcagccgcagctcacgctgtcgcccagcttcttcatggcttcagcggcgcggttggagtagccccattcgttgtcgtaccagccgcagaccttcaccaggttgccgccgaccacatacgtgaagccggagtcaaagatgcaggagtgggggtcggaaacgatgtcctggagaacgagggcttcttcagagtaatccagaatgcccttcagcgggccttcagcggcttccttcatggcggcgttcacttcttccacggtcacgttcttcttgagaacggccacgaagtcggtcagggaaccggtcggggtcggcacgcggaaggaagcgccgttcagggagcccttcaggttcggcatcacttcgccgatggccttggcggcgccggtggtcgtcgggatgatgttgatcgcggcggcgcgggcgcggcggggatcggagtggggaaggtccaggatgcgctggtcgttcgtgtaggagtgaatcgtgctcatcatgcccttttcaatgccgaacttgtcgtccagcaccttcaccatgggagcgaggcagttggtggtgcaggaagcgttggaaacgatgtcgtgcttggcaggatcgtattcgctgtcgttgatgcccagaacgaaggtcaggtcaggatccggggagggagcggaaatgagcaccttcttggcgccggcttcaaggtgcttcttggcggcgtcacgcttggtgaacaggccggtggattccagaacgacgtctacgcccagcttcttccagggaaggttggcggggtcgcgttccacggtgatgaggatcttgtgaccgtcaacgaccagatattctccatcaatggaaatttcaccgtcaaacttgccctgcgtggagtcatacttgagcaggtgggcgatcatttcaatgggggtcaggtcattgatggcaacaaccttgttgcgttcttccttggacatggcgcgcagtacgttgcgaccaatacgtccaaaaccgttaatagcatatttggccataagattgagggcttcagatttgattaattactagtcccggacttatttaagtaccatggacgccgtaagtttaaaaacgattcaaccagccgtcaacactattgttcccccatcatggcagtatgctcccgcgcctgcgcagaccgcaggaagccctgcccgcgggcatgctcccgcatggaagtcaaatgcttgcagagccggtccccgggtggggaagacggtcagttcatggagcgcagggcggcgcggatcagttcgtccgcatccgcgtccggatggtctttcaggtgggcggcgatcgccttgcgggactccacctgcttgaacccgagcgcaatcaacgccagctccgcatcccccgctgcctgggaggtggcgccctgcgcctgggcctcccacgtagcggccagtcccaccttgtccttcagctccaggacaatgcgttccgccgtcttcttgcccacgcccttggcccgcgcaatgccggaaacgtccccgctcaccaccgcctgcttgaactgctccacggacagggaaccaagaatggcgatggccgtggcagggccgatgcctgaaacgcggtcgatcagcagcaggaaaatgtcccgctccgcatccgtggcaaagccgtagagcacctgcatgttctcccggacatgcaggtaggttttcagcgtcagctccctgccgggaagagggttcagcctgtcaaaggtggagaggggcacaatcacctcataccccacgccatgaacatccagaatcaaccgctggggatatgattccgctaccgtgccgcgcagaaaagctatcatgcccataacgtgacacaatccggcccgcgctcaagccaaaaacgcatctgcggaaaccggccccatcatcttttctggagcacgtgcagcctgatatgctccagatcctcccggtgataaaaacagcgcacccggaggccgcgggcggtcttcatccggcaccggtattcgcgcagcaacccctttttcacgagcctgtaaatgtagctgcgcaccacccccagcatgttgatagcctcagccatgtccatgtagcacggtggcacgcggcggcgtacaggctcccgccgggcgagaatccggtccacatccgcacgccgccagtacagggccagggaacccgtacccttgcggaccacgcggaagcgggctccgtgacggtgcaggtactggcgggcggcggacgcgctgcagcagagccgcgaggcgatggaggacgtttccacgaacgcgctgcccgcttccgcataaggctggccggatttgggattcgttccccgacggcggattttcacatgttccgggaagctcagcttgggattgttaatgtattcccgtcctcctactccgatgaatgttttcttaaaatggtatatcatggttaatgagtttttacattgggattgcgaagctccatgcagacattccgcacgaaactctaacatttttggaagattccaaaaatgcattgagtccaagaatgttcaacatttttctttgtttttctgtttttcacattcatactgaactcatttcatcgcaatatatgcccggaggccgtatcagccaatcacaggaaaagggcctacgcccccggcggaaacagcatgttcctcaactctttccgccccgcaggccttccgttccggtgaatacagaggttcacgggcacagggaaaaacccccttccactagcgtttttactggcgccgtacggttcaagggaaaacttttttcccgctatgattctaccatacggttccacgcatgcacggcccatttccagaaaagggcctgggaaattttatgaaaggccttccgcgttccatctccccagcggcctgttcccatcccggacgccggcccacgtgttttttccggcattccatggattttccgggaaccggggcaataaaaaacccggcttccctatggaaagccgggcatgaaaaaagaatgtttcagggcaggagcttcgcgggccgcccttcaaaaatcccgcgctggggaacgaagatgcggtcattgggctgaatgggaatcgccctgtccttgatggagaagtaatcgtacgtcacggtttttccgccgcgcgtcacctgcacgtaccgggaaccccagtccgtaatgtcgcccgcgcccacaatcgcttccagaagcgtcatgccgcgccgccacaagacgtttttcttcatggctacgccgccgctcaccagcacaatgtgctccgtcagccgcgcgtccgaactctgcaccttcaccagaaaggtgggggccgtgtacaattccgccttcttataggcggccatcagcatatcttcaatctggcgcgccgtcttgcctaccacgcgcagcacgtcgtggcccggcggaagctggggcatgcgtatcgtcccgttgccgtccagcagatactggccggaaatggccgtagcgtcatccgcaggaatgccgcgcacctgaatttcaatggtgccctgcgcagacacggcgtccggagactgggcggacgccagccccgccgcacccagcaagaggcaaaggagggaacaaatgtattttttcatggagcaatgggttagtacagatcttcactatcatgggactgggtggccgccagctccttggcctttccggaacgctcggccttcttcatggaagaggcgtccgcattctcgccggaggaaccgccatccgcagaataataggagtaataagtcgtgtaatactgatactggtgatcggacgtgatgtccacattattcatcaccacgccggccaggttgccgcctacggattcaatcacctgcttctgcctcagcagggctttcagcggcagtttgcggggctgaacgaccatgagcgtcatatccacctcactcacgatgacggcggaatcactgacgccgaggatgggcggggagtccaccagcacgatgtcaaagcgctgcttcacttcctggagcagttcattgaatttgcgggaattcaacgcgcccgacgggtcgaagggcgtggggcccgcaggcatcacgtacaggttttcaatgggcgtctggaaaatcacttcctccagcgggtagtcttccagcagataggaggtcagccccacttcattgtccagttcataataccggtgaagcttggagcggcgcaggtcggcgtcaatcatcagggtggcatagccgccctgggcgcagatataggccaggttgcacaaggtggtggtcttcccttccccggcactgccggaaacaaaggtcagggaaatttcctccaatccctttttattgaattctatatttgttcgcagaatacggtaggcttccgcgtccgggcccatcacatcggaagaatgaaggatcggcacattcttggggataatgcccagcaccggaacctgcagggcccgttccacgtcctccatcgtcttcacggaggtgtccatgaattccagcaacagggccagcccgatgcccagaagcagcccggccccggcgcccaccgccaggttgatggtcacgttcggcttgtagggagcggcaggataggtcggaagctggtacatttcaatcgcttcacggggaacgcgcagacgggcgatttcatccttgtaccgggaatccaggtccttgagctggtccagcgcagcgtcataatcacggctggcctgttcatacatgggaacctgcaggacatgcttctggagagcttcctccttttgagcgacggtcgcctcccagtgcttccggcttgcggaaaccatttccagcttgcttttcagggaggagcgcagcccgatcagctccttgttcagcttctctcccagaatcctttccgtctccagcagcgccagcatcttggggtgcctggccccgatgttctgggctttcaggttttccttctccttgagcttgtcggaaaattcggcataggtttcacgcagggccttggcccctacggattccgcattcagcaggtcggaactgatgacgtaatccagcagcttgtcgtcaggcagacgctgcagttcctgcacgtaggaagccagttccttttcatccttttcaaactgcatggcctgggatttggcgttccggaagtcttcctcttccatgccggccgtcagagtgctccggttttcaccgtttctccaggtagtgggaaggtaggagctttccgcaatcagcttcttgagggacatcatcttttcattgacggtatcctcctgttcccggagaacgtccttcaaacttttgatggcggtttccaccaggcggttttcacgcatttcacggtcctgcttgtaagcctcgggaaccgtcttggcgatattctgcaccagtttgggatccgggccggagacaatgacgtccaccaggtccgtcgcacgcacgggagccaccttgatcatgccggccagattggatgccgccatttcatccgtcatgccccattccgcggcaagattcagcttcctggacaccaccttcagaacttcagtggaagtcagcacggaatactgcatgggaatgtagttagccgtcacgttggaggaggcgaccacgtcccccccctggccgatttccattacgggcttgggcagcttgatctggaactggctcgtcgcccggtaggagggcggcatcaggaaagtcactaccacggaaatgaccagcaccagaaggaagaccaggaagacctccttccagcgattttttaaaacttgcaaatagtcaatgttgcgtacgatgcgatcactgttctgctgatcctgggcattcatgaaagatagtgaggtagtaagataaaaactcctctaattgtgaatgaacattcgcaattagaggagtaaggacattaatggtcagtcaagacttagaagctgtaattcacgccgaaggagaacacgttgcggttgtaggagggcatcgggtagttatagccgccgtaggaaccgttggtgtaggagtactgggccgtaagagccagcgcattagtcagcagcagcttgatgccggccgtagcattgaaggtcaggtcagacgtatcactgttgctgccggagctcaggcggctgtactcgctggaaatcaggtttacgccgcagttcaggctggcgcggtgcgtcagtttcagcgtgctgttcacgccgaagcgccacgtttcattggaatagtaactggcaccgctgtagggaatgtacgtattcgtcgcttcgttggagtagcggatgaacgtgccgatcatgaagcggtcgctcatgcggtggttcaaaccgaattctgcggaaggataggtcctggtaccgtagctttccacatatttgaactggggacctacgcggagcgtggcggacgtattttcagccacagcgtattcagcgccggccatgacgaagttggagaattcgttgttgccgtattcgcggtcgcagtaggaaccgttccagctcagggaaatagccaggcgttccgtccacttgtagcggttggtgaagtccatgcccacatagtcgcggttgtccgtcttggcggagtcctcctgatagttgatcatggagaagttggcgcccagcgtggtggagtagcgggaggtccatgccttgctcacggagctggagacgtacacgtaaatgtagtcgccgtcccggcgggcgttggcaatgccgttggaatagttgggttccggctgccacgcaaaggacacgctgccgttgtagcgcagggtctggtcaaagctgtgggaaaggttggcggagagcgtggagttggaaagtgattcgttcgtctctccctcaaggtccttcaggtaaaagatacccccaagcttggcggagaaggagtactgggtcacggaatcgtagttggccagggaggcgccgatgtccgtgctgatgaaagcggcttcctgctggtcatagttggaagcgttgacgttgtcgtcataaccgccggccagattgaatgtccacttcaggggaagggattcttccagaccgaccggtcctgccagggtgtacagggactgcccgttggcatggacggcaagcatgccggcagccatcaaggagagataaaaaggactcttcatgctattgataaatggatcgggttaatttccggcaggattggagatgggagcggggcttgtagcagagccgcccacgggaagaccgcccggcaggaccagggcccctccggatgcttcctcaccaggcctcaccagaccgctggtctgagtggtcaccccttgcagaggattgtcaggcgtctgggccgccacgcccacggcaatgccgggaacggcattggctaccatggagctgcccagagctttcgtaaccgcttccgagatgggagagacggacgcatacgggtggggctgcacagccacagcagaggcaatcacgttgcgtacgttggcttccgttacctgggttccatagcttttaacggcggcggaagcaacagcgggcgcgctgcccgggaaagcgcctgcggccatggataccagggagcccatcacctggtcagacacgccggccttgacggcggcgttcagaatctcggtcacggctttcatatccagggcgccggccttcagactggcctggacaacacctgccatttgattcataaaagccttttcaacagcagaggctttaaccttattaacagccggaacggctgccggagaagcagtttgctgagccacaccggggagggcgcccgcaaacgcaagtgccagcgcactgagcgccgtctttgtcatgaacctggctttcataaaggaagtatctagcaggtgaatttaatgaaaaaatggagcgggtaacgggaatcgaacccgtgtgatcagcttggaaggctggagctttaccattaagctatacccgcacaacagaggcattatgttcaagcctcgggggtaagacaagttttttttcatttctgtgttaaaatatcaaaaaagaagacacgatttttctgtggtcttgacatacctgccttctgccgctaaataggcatccgcatttcatgcgggcgtcgttcaatggtaggacgcgagcttcccaagcttgagacgtgggttcgattcccatcgcccgtaccacttttataccgcaagcaattgttcctcaatgcttgcggtttttctttacactttaaaaagacgagcattccggaggctttcgctttccggaaaataaatttcccccattcccgcttcccgggtattccgggagaatttccggataagaaaatgccgctccctcttccgctgcgccggaagcagccgcctccggcgcagccgtgaattacaggcctttaccagccaagaacaaatttccgctgaattttcgccaaaagaagaaccttgcggatcatcgtgcgggtttcattaaggaggttgaggtagaggagcgcccgccgcatgtcggatacgtcctccgcccgcaggatgatctgctgcttgaccgcctctgcaaattcctcatccagcgcgtccatgccggccaggcattggtccagcccggcatagtcgttgctttccatcatttcccggaaacgggggtacagggaggaaacgcggttgttcatccccctcaagtgctctatcctgtccatgtccagcccttcatgattgttgtctatgtaggcatggctggccgtggtgatgttggagagggattcaaagacggaggtggcgtattccaccatctgcacgtagcgcttgccgcggtccgcctcttcatccgggagttcccggacgacgggcatgacttccatcgccatccggtcgctcagggagcggcggatgccgcgagcttccttccggagctttttcagccgcttccggtcctccacgttcagggcttccaggttcatttcatagatttccgccatgcgtttcatcagctcaatgatttcttcattgtagcgggcggcgcaggccggatcccggtaattggccaccttcgccagcgccgcggcctgggttctttttttatggagcctagagcttttcagcagcaggaaggctgccagggcacacatggcgacaatgccgaacaggcctccgtaaacgatgcacgccgccaccatgcagcacatggtgaatgcggcaaaggccgtaaagaaccacccggaaattaccgtaatcacccccgtgatgcggtacacggcgctgtcccgcccccaggctttgtccgccagggaggaacccatcgccaccatgaacgtcacatacgtggtggaaagaggaagccggagggacgtagccagggagatcagcagggcggcgaccgtcaaattcacggaagcgcggatcaggtcaaaggaggccccgttatccgggccgtccggcacgggctggaaacgtttttcaatgaatcttcccacgcaggcgggcatgattttttccaccgcgcgggaggcgttcaacgcatagcgcacggccatgcgggccggggggacggagccgaaccgctccacgcccccgccctgcctcgccaggttgacctccgtatccgtgacggtctgcgcctttttggagaacatgagggccagcaccatgatgacgcccgcgctcagcaggtagcgccagtccgccgtgacggggaccatgaggccgcccatggtgagggtggaaaggtccgcgccctgcgccgcagcggcggacgctatctccatggaggactgccccgccatgaaaacgccgatgaagttgaccaggtcgtttccggcaaaggagagcgccagggccatggtgcccgccaggacggatattttcaggatgttgattttgcaaatgttctggagaacggccatcaggacggtccagaataccaggctgcagcatacgtacagccagatgtgagcgtccaggtggcggatcatgtccttggtgaccagcgtactgcctttcagccccttgaagatggcgaagtaggtgatggccgtcagggccaagccgcaccagacggcccccaggtatttgaatgattttttgtagttgaaggagaagatgaggcgggaaatccacatgaccgttatcccgcaaatgaaggcgacgaagacggaggagaagatgccggagatgatcgccagcgccttggaggagttgatgtagctggacagttcctgcgctgcgcccggctctgcggaccagattttgaacagggcaaccgccacggcgccgcccagcagttcaaagacgatggagaccgtggtggaggtgggaagaccgaaggtgttgaagacgtccagcagaatcacgtccgtcagcatcaccgccaggaatatcagcatgatgtcatggaaggtgaactgggccggcatgaatacgccgcttctggcgatttccatcatgccgctggagaacagggagccgatgatgatgcccagggcggccaccagtatgatcgtcctgcgcggcgcggccttggaaccgacggcggagttcaggaagttggcggcgtcattggagaccccgacgacgaggtcaaagcaggagagcaccagaatcagccctatgatgaagtaatagattgggtccataagcgtaataaacggccctctattacaggaggccgcttccgcacgcccgttttaaaacgtgaacattccgtcacattgatgcaacaatatgattttcaatgaaaaccatagcgctacacctgcttcccgtgaaatcttccgtttcttccgggtacttccggagcctggttttcctccggttctccggcagccacggctcattttcctgaaatcccttcccgcggagtggcggctgccgccttccatacaaaacaaaaaggccccccggaaaaccggggagccttgaagtcgattgccgtgtctcgcagaaacggacgggggcttacatcatgcccatgccgcccattcctcccatgccgcccatgtcgggagcgccggagccgcatccgcagcccttcttctcgggcttgtcggcaatgacgcattccgtggtaagcagcaggccggcgatggaagccgcgttctgcagggcggaacgggttaccttggtcgggtccaccacaccggcggtgagcaggtcttcatatttgtccgtggctacgttgtagccgtcggccgctttcttcatccccttcaccttggcgacgatgagggcgccttcacggccggcattgctggccagttggcggagcggagcttccaccgcacgatagacgatttgagcgccggtttcctcgtcgccttccagcttgagggtgtcaatggctttctgggcgcggatcagggccacgccgccgccgggaacgatgccttcttccaccgcagcgcgggtggcgtgcagggcgtcgtccacacgggccttcttttccttcatttccgtttccgtagcggcacccacatggatgacggccacgccgccggccagcttggccaggcgttcctggagtttttcacggtcgtagtcggacgtggtgtccttgatctggtggcggatctgggagatgcggccttcaatgtccgcagacttgccggcgccttccacgatgacggtttcatccttggagacgaccacgcgcttggcctggccgaggtcttcaatgcccacgttttccagcttgatgcccaggtcttccgtgatgcacttgccgccggtcaggatggcaatgtcttccatcatggccttgcggcggtcgccgaagccgggagccttaaccgcgcagatgttcagcacgccgcgcaggcggttgaccaccagggtagcgagagcttcgccttcaatgtcttccgcgatgaccaggaagggacggccgctcttggccactttttcaagcagcggaaggaagtccttcaggttgttgatcttcttttcgtggatgaggatgtaggggttttccagcaccgcttccatcgtttccgcgttggtcacgaagtagggggacaggtagcctttgtcgaactgcatgccttccaccacgtccagcgtggtttcaatgcccttggcttcttccacggtaatggtgccgtccttgcccaccttgtccatggcttccgcgatgatgtggccgatttcggcgtcccagttggcggaaacggtggcaacctgggccacttccttgctggagtcaacaggcttgctgattttcttgagttcttccaccacggcgtccgcggccttcatgatgcccctctggagggagatggggttggcgccggcggtgacgttgcgcaggccttcgcggtaaatgctttcagccagcacggtggcggtggtggtgccgtccccggccacgtcgttggtcttggaggagacttcccggacaagctgggcgcccatgttttcaaacgggtcttccagttcgatttccttggcgacggtcacgccgtccttggtgatgaggggggaaccgaatttcttgtcgatcaccacgttgcggccggcaggccccagcgtgctcttgacagccttggcaatctgttccacgccgcggagcagagcctggcgggcggtttcgtcaaattggatttgtttagccataatatcaggttattttaaaatgatgttgagtgagtgtgtcgtgtgatttagccaatgatggccagaatgtcgttttcagacaggatgaggtagtcttctccgtccagcttgatttccgtgccgccgtacttggaaataagaacgtggtcgcccggcttcacggtgaattcaatcaaggcgcccttgtcatcgcggccgccggtgcctacggagatcacttcggcttcctggggtttttccttggcggtgtccggcaggaacaggccgccggccgtcttggtttcagcttcaatgcgcttgaccagcacacgttgtcctaggggtttgatgtttgccatagtatgttgtttttgtgttgttatagatgaatatatggatgtaatgttccgccggaggggaagttgctcccccctccggcgggaaggggttgcttatttgtcgtcgtcgacgatttcggcgtccaccacgcggcctttcgccttgcgggggccgtcggaagcttcttcctccggagcggctcccggcatggggccggctgcaccggcggactgctgggcggcttccgctgccttgtaaagggcttccagacgggattccaggtcttccttcccggccttgatcgcggtgtattcctttttggagatggcttccttgaggtgcatcaccttgtcttcgatctcgcgcttgaggtctgcgggaatcttgtcccccatgtccttgagctggcgttccacggagaagcagagggagtccgcctggttgacggtgtcaatttcctcggcgcgcttcttgtcttcttccgcatgggcttctgcatcacgcttggcgcgttcgatttcatccttggaaaggccgctggagccctggatggaaatcttctgttccttgccggtgcccttgtccttggcggagacgtgcagaatgccgttggcgtcaatgtcaaaggtcacttcaatctgcggcacgccgcgcggagcggcggagatgccgtccagcttgaagttgccgagaagcttgttgtcctcaaacattttgcgttcaccctggcagatgcggatgtccacggcgggctggttgtccgcggcggtggagaacacctggctcttgcgcaccggaatggtcgtgttgcgctcgatcatcggcgtagcgatgccgcccatcgtttcaatggacagggtcagcggggtcacgtccagcagaagcacgtcgttgacgtccccctggagcacgccgccctggatagcggcgcctacggccaccacttcatccgggttcacgcccttgtggggttccttgccggccagcgtatgggccatttcctgcacggcgggcatgcgggtcatgccgcccaccagcaccagttcgtcaatgtccccggtcttcaggccggaggcggcgatgcagtccagcacgggcttgcgggtacggtccagcaggtcttccgtgagctgttccagcttgggacggctcagcgtcagctggatgtgcttgggtccggaagcgtccgccgtgatgaacggcaggctgatgtcatagctctgggtggaggaaagggcgatcttggccttttcagcttcttccttgatgcgctggatggcgtccggctggttggaaagatccatgccggagtccttcttgaactcgtccatgatccaggtgatgatcgcgttgtcccagtcgtcgccgcccaggtgggtgtcgccgtcggaagccttcacttcaaacacgccgtcaccgatttccagcacggaaatatcgaaggtgccgccgccgaggtcgtacacggcaatgttttcattggacttcttgtccaggccgtaagccagggcagcagccgtcggttcattgatgatgcggcgcaccttcaagccggcgatttcaccggcggccttggtcgcgttgcgctgggcgtcattgaaataggcgggaacggtaatcacggcttccgtgatcgtctcacccagcttggattccgcgtcggccttcagcttggccaggaccatggaggcgatttcctggggagaaaaagtcttcttttccccgcctacgtccacgcggatataggcgtccccgttgggggcctccacaatttcataaggcaccttcttatcttcttccgtcagctcgctgtacttgcggccgatgaggcgcttggaggaaaacacggtgtttttcggattggtcaccgcctgacgtttggcggcctgccccacgaggcgttcaccgctcttggtgaaggcaacaatggagggagtggtgcgcgcaccttcgctgttttcaagtacggtaccctgaccgccttccatcacagccatgcacgagttggtcgtgcccaagtcgattcctaatattttagccatatcgttatcttagattgttttaaatggatttcgttgagatttgatttccccatgacctgaagtgtcatgcaggcaaactcatgttcttgcctctctttctgcaaatggcatgccagccttgtaagccctgttgaaaaataaacataaacagcataaattcatcgtattataacatcgcatcatttcgaccgctctttttcctgccgagcagcaatgggacatattgtcacaccaaaaagagacaaaatgtcacacgcggccattttgtcccacaccccccggacagcctatccccggcgcccgtcacgaagcttccttgcaggaggaagcttccgctcgctctggttccgcatttgccgtaagccaggcgtttcatgaaatccttgtaaagcagcgtttccatgcggccgtccccgtattccaccaccgcgctcatggtttccacccagtccccgcaattcaggtaccgcacctcccccaccatggtatccgccggatgatgcacatgcccggcaatgataccgtcacactgccttttcaccgccagattctggagctgctcctcatatttcccaatgaaattgacggcggatttcacgcggctcttgatggcgcaggagacggaataatattccctgccccgccaggcgcggtatttattgtaaagccggttgaccgtcagcagaacgtcgtagcccagggagccgagcatcgccagccaccggtggttggtggagatggcgtcaaaaccgtctccgtgcacgcacaggtaacgcctgccgtccgccgcccggtgcacgcactccctggccattttcaggccgcccagatgaaagggaaggaatttttccagaatatcgtcgtggttcccgcgcaggtacagcacttccacatcctcctgctccatctttttcagcagggtgcggatcaggcgcgtatgccgcctgcgccagcggctgccgcgggagagggcccaggcgtccacaatatcccctaccagaactattttttccgcacggacatgcttcaggaacctccggcattcgtccgccttgcaatccttcgtgcccagatggaggtctgacaaaaagaccgtgcggcattccagcaccgcatcccgcggggggcgggcgtagccggttccattctcctcccgcgccacggaggccagcagttcttcaaacctgtcatggatggaatcccacgctctggcgcgcacggtcctgcgggcctgttcgccgagtctccggatcatccccctgtcctccagcagacggtgcatggcggagtaaaaaccctccgcgtcccccttctccgcctgaaggccgttgatgccgtccagcaccacatccgcagaagcggcgtaccggtagctgaccgtagccaggccgctggccatcccttccagcagaacgttcccgaaggtctccgtctcactggcgaagagcagcacgtccatggcggcgtaatggcgcgcgaggtcctccccgctgcgcattccgcaaaacacggcgtccggaaactcactgcgcaggctgctcatcatgggaccgtcccccaccacgaccatcttcatgccgcaggccgggaactcccgctgcaggcgcgtgtacaatcccagggccgtcaccaggttcttctctcgggccagacgccccaccacgccgaacaccacttcatcccgccaggcgccccatgactggcgcaggccggcatccctcctggcagggtcaaacaaggcggcatccaccccgcgccccattacggagaggcgttcaaatcccagcccctccagcgcgcggcgcatctcctccgtgggcaccaccgtcatccctgcccggttgtggagcttgcgcaggtaattcacggcggcggtttccagcccggagaaatggtaatccttcatgtactggtgaaaattggtgtagaatcccatcaccacgggaatctccagagcgcgagcggccttcacggcggaggcccccatggggctttccgtggcaacataaaccacatccggcctcttcttcatccatctggagcggaacctttctgcggaaggcagccctattttcacctcatgatacatggggagggagagagacggcatggccgtctctccgggaacggaagctccgtccctcccggaagccctcagcacatgcaccagatgcccccgcgtccgaagcccccggaccagccgctccagcgtcagggccactccattcacgtcaggttcatacgtatccgttgccacatcaattctcatgcgccggcaccatgggcagaaaggccttcccaggcaagctgaggagggaaacgaaaccgtcacaggctgctgtcatccgtccccgtccccagcaggagaaacaaccgtgccggacagattccggcatgtccccccggcttttcctgcacgggaaaccgaacagaggaggcggcctcccccactccctgtttggaaggtgccgccggcaaaaccgcacatttccgtaaaaaaacagacgaatcattgaatatcagacgctctgaaactacatgcggccatccgcgcattataaatccgccgtcaaccaaattttttgagaaaaaatgattttcatcgtatccaggacgggaaaaatcacaatggaatccaaaggccgtgaaatctgatattcttattaaccattgataatgtttctattatttattaaaaaaattattccttcccgacagccggatttataatccgccaaaatgcatgcatacgagatacataaaacggaaatgaaggaatatttagaaagatttttaataaaaataataatgattcccatgttctgaaagccgggaaaacgtggcggaacgccggatgcttatctctgccttttcccggtccggaaaccgcagccggttatctccttcattgctcctgatactcttgcatattatccttcaacctgctttaaacaccccggattaggaatccggcgtcaatactagtttttcatatcaagcctgtttctccaaatcaatccagtattttcctagacgaaagccttgataaaatatgtttgttagaataaagcataaatacttgaatataatgattgttcatcttattttagcgctgtcggccatttcatccggattcctaattcgctattgaaacaaccgacccccatcccctaccccattcccccaatgaaattgatagattgctatcgctatgcagccatgctttatgcatccgcctgctgtaccgcctcgccgctttacggccctctggaaacaggcttgcaggaagcccagcttctgagttccctgaaagcctgcaaatccctggaaggtccgggaacggacgcctacctgagccgcactggattgaacggcgcctacaaaacgaaaaagcccattggcggccttttcttttcacttcattttgagtacaacaaggatggaggcctgagagccgtctccttttactccagcaccaaggcaggcaaggacgaatacgatacgcgcctgaaatccctgtacaagcgcatgctgaacgggctgacgggcctctatggcccgcccatgaatctgccggactggattgagaaggagtccctgcccgcggaacgcgtgctgtacatgcacatgtggcgcattcagccgggctgcttcctgatggccggcctggccaacatgggggcctccggctacattcccgttttccggatttcccctcctgccggcatgccgcccaagtccaaaaaggacagggacaaactcaaatccgaatgggccgccattcccgaattttacgaattcaccaaggcggaacgcttcctggccaatgcggtgttcgccatgtcccataaaaaatatcaggacgcgctccagctcttccagaaagccgcggacctgggcagccccaacggatactggggactggcctacctgtaccggctgggacccgccggcgtggaaaagaacgcgagcctggcggatgaacacactaaaaaagcggccctgatgggatttgcgcgggctgccatgaaattcggaaaaacatgggaacaattctgcaagaaccaggatttcaccgaagctgaagccagggaatggcagaacaggaaccttcgggcagccagagccggctatgcctccgaacaatacaacctgggcatcatctaccagcacggcttcggcgtggaaaagaacctggccaccgccagggaatggctggaaaaggcggcctcccaggaccatacccaggccaaagcggcattaaagacgctgccggacgccggagccggaaacgcggaactctcctgaccatcttccaacaaccaactcccccaataccaagccggctgtagcttctccggaagtacacgcagccgctccggcaaatccctatgaaatgccagaccggcagggaggcggccccaaccgcttccctgccaaaaagccggaaatgcaacgccggaggaaaccgcgggaagcatcagcaaatgcggggcagctgcatcccggaaggcatgcccagcacccgttccacccccagctgccccgtcatcagcaggggcgccgttccaaactcttccacacggcctatggcgcaggccccggcggacacgccgcagccgcgcatcaggcgcagggcctcttcctcatgctcccggggaagaatagccagataacggccttcacaggccacttgaagagggtccagccccagcaggccgcaggctgctctgacatcctcccgcacgggaatggacacttcatccagtttcaccgtcaggccggaggactccgcaatttccgagagcgtggcggttaacccgccacgggtcacgtcacgcaggcaatgcacggggattccggcccggacgacggcagccacggattcatgcagcggggcggaatcactctccagtccctccccgaaggacaacccggcccgcaggctcatgatcgtcatgccgtgcctccccagatcaccgctgaccagcacggaatcccccggacggacggaagaagggctgatttccaacccatggcgcaccacgcccgccccggcggtattaatataaacgccgtcaccctttccgcgctccaccacttttgtatctcccgtcacgatgcggacgcccgccgcgcgcgccgccgccgccatatcctgcaccacgcggttcagcgcctccagcggaagcccttcttccaggataaagcctgccgtcaagtacaacgggtccgcgccgctcatggcgagatcattcaccgtgccgtgcaccgccagggaaccgatgctccctcccggaaactccagaggctgcaccacaaagctatccgtggtcatcgccagccgccccggcggaaaatccagaacggccgcatcattctgcacgccgccggagggagtgccgaatgcgttcagaaagacggaacggatcaggtcattcatcagacggcctccgccgccgtgggccatctggatacggtcggaaacaggttccggaacaggacattcaaacatggaatcaacttcttttataacggtaataggcggcgcaggccccttccccggacaccatgggcgcgcccaggggagccagcggcgtacaggacgtgccgaaaaacgggcactccgcaggacgaatcagccccctcagcacctggccggccaggcatccggaagcttcatccgcgccatgggcgctttttccgcatccgaaacgcagggcggcatccatgtcctcccactcccggcgcagcctcatgccgccgccgggaatcaggcccaggccgcgccaatggcggtcttccggctcaaaaacctctttcatcctttcctgcgccgccctgttcccctccggcttcacatagcgcccgtaggcattctgcaccgtgcaatccccgttctccaactggcggacgcacatcaggatgccgcggagcaggtccggagcctcaaaccccgtcaccgccatgggcgtccggtaacgagcggccaaacggccgtaatccccctcccccatgatggcgcagacatggccgggggccagaaaggcgtccggccttccctcgtcctgatccatcagccattccagtgcggggggaacctgcacatgggcacagagcacggaaaaattggcgtaacccagcgcgcgggcctgctgcatggcaagagccgtggccggagcagtcgtctcaaatcctacggcgaaaaataccacttccgcttccggatggctcccggcgaaagcaaccgcttccagcggtgaatacatcaaaagcacgtccccgccgcgagccttggcggaaaacaaatctccgctggagcctggcacccgcatcatatccccgtagctgcacaaaaccacgccgggccgcaggctcaactccacggcctggtcaatcaaatccaccgacgtaacgcaaaccggacagccggggccgtgaatcagacgaagcccaggaggaagcagctcctcaagccccagggaggcaatcgcatgcgtctgtcccccgcacacctccatcaccgtccacggacgcgtcacggcatggcgcagctcctcaagcaactgctgaacttcctcctgcataagccattaaaaatgttcaatccggcaaacgaccctccccttacacgggatcggtattctccacgatctcccgcatttccctacgggtttgaagcgcggtcttctcatccagcacgctcagggccatccctacatgaacaataacgtaatcccccaggacggcctccggcacgcaggccaggttcacttcacgggtcacgccgccgaaatcaaccactcccagcctgaacagcgggtccgtctcattaatgctcacgatctttccgggaacagccaaacacatattattatcctttccattggcgcacgactgccgcagcctgccccagggaaattcccccgtcattgcacggcacccgctgcggcagggacaactggcaccttctagactgtgccattcccgccaggccttcaagcaaaaaggcattctgaaaacatccgccgcccagcaccagcctgtccagtgagaaacgctccgccacgtcaaaagccaggttcaccaggctctcatgaaacttgcgggcgatgcagccgcgggaaacgcctctcagcaggtcatcgtccacggctttcagcatcgggcgccaatccagttccagcaggccgccctcctcatgcatgacccattcatacggttcccccggcatttcttccccggaaaccgccgcagcccatgactccagcatcatggcggcatgcccttcgcatcccgccacgccgtcaaagccgcaccagaaagccatggcgtcaaacaggcgccccatggatgaagtggcgggagcttgaatattacgggccatcatcgcctccagggcttcccgcttctgcaaggtcattccaccctgcagacgttgttcaagcccatccgtgcgccacggcgccatctgccgcgccagggaacaggcgcaccgggcaggttcccggaccgcttcatcccccccgggcagcaaaaacggcctgagccgcgccactctgcggggagcgccttcctcctccatcacaaaaaactctccgccccataccgtcccgtccgtgccgaatcccgtgccgtcccaggccgcgcccagggcgggcaacggcgtctcattctccacggcacaggccagaacatgggcctgatgatgctgcaccggaacgacttccacattccatgcccgcgccagacgcctgcccagggtaaacgacgggccgtccggatgggcgtccacggcaatcacctgcggcacagcacccagcgtgcgccccagcgtctccaccgtccgttcaaacgcgttcagggaagccgcgctgtcaagatcgcccagatgctggctcatgacggccacgccgttcttcagccagcaaacggtattcttcaacccggagcccagcgcaagaacgtcgggagcttctgcagacgtgcgccacacgggccgcggagcatacccgcgggcacggcgcaccatcatggcccttccgtccatgacgcggaccacggaatcatccacgggccgcacgaccggacggtcatgcacaaaaaacacatccgccacatggcccagtttctgcaagccttcctccacggaaatgcacaggggctccccgctcagattgccgctggtcaccaccaggggctttctccatacatccatcagcagggcatgaaggggggaggacggaagcatcacccccacaaaacggctgaacatgcacacggaaggagccaggtccacatccttccttccgggagccagtacgatgggggccgccggagaagccagcaggcgcttctcctcctccgacaaacggcacagcttccccgccgcgtccacatccggcaccatcacggcaaagggcttggcatcccgctccttcagcctgcggagacgcctgacggcggcttccgaagaagcgtccgccagcagttgaaagccgcccacgcccagcagagccacgatcaggccgtccgccagcacccacgccacctgttccgcgggagtgtcaaacccgtggccgaaccccagttcggaaccgtctgaaaacagcaccttcatggaaggaccgcacgacgggcagcctatgggctgggcatggaaacgcctgtcctccacatcccggtactccctcaggcactccgggcacatctggaacttcttcatgctggtgcccgcacggtcatacggcatctcctcaataatggaatagcgggggccgcagtgcgtgcaattggtaaacgggtaatgataccgtcgggaggcggggtcgcgcatctccttcaggcactccggacacggggccaggtccggcagcatcatcggaacgccgccgggagtagaatcgctttccacaatgcggaactcttcaaacccggcaggctcgcacacggtctgctccacgccatacacgcgggcgtgctccggcaaagtatccatcagcgcggcaaaaaaacgttccggagcgccgggcttcccctccacatggatttccacgccggactccgtattgcgcacgaaccccttcaatccgtgccgcacagccaaacggtacacatggggacggaaaccgaccccctggacgatgccggctatctcaaacttcaacgccgcagcggcctgttcaatggtggtgatggccatggtgctggatcctgccttcccggacgcggcgcgcgcgttccacaatctcgtcgcaccacgcgtccattccctctccggtcttggaggacaactcaatcacgtgcgcatgatgggctaccttgttcagggcggccagggcggcgtcccggtcaaaatccacggcatccgccagatcggacttggtcaccagggccacatccgcggaatggaacatgggaggatacttcaacggcttgtcctccccttccgtcacggaaagcaacaccacgcgcatgccttcccccagatcataggaagccgggcaaaccagattgcccacgttctcaataatcagaacgtcaagatcgttcaaaggcatcttcttcatggcttctgcaatcatgcgggcgtccagatgacacatggtgcccgtcgtaatctgcaccacgggaatatccgcacggctcaggcgttccgcatcattatccgtcgccagatcccccacgatcacccccatgcgcacacggccgcggagcatctccgccgtcttctgcagcagagaggtcttgccggacccgggtgaagaaaaaacattgataaccagaaggttctttgctgcgaaaaaacctctgttgcgctctgccagccggtcattggcgtccaacacaggaacatggacgtccatgccgtggccgtgactttcatgggtgtgctcacctccgcatccgcattctttacacataatcaatactgatattagattccaaaaaagagaaaaaatctcatttatcctacgtcatatcctggagacggcaaggtcaaactccccttgaaccgcatttcaggcccggacatcccggggcagaatacgctatcaaacaattcccggaaaaaccgtttaaagaaacagtccgaataaataagacaagtttacaatgcagctcttctggcctaccatcccaatcaggaaaacagcaatgaaaaacgcggaagcaacagtcggaaatctcattgaccatcagaaagtggcattcatcagctctattgatgaacagggctatccgaatacgaaagccatgctgccgccccggaaaaggaaaggcatcaaggtcttctacttcaccaccaacacctcctccatgcgcgcaaggcaatatcaagacaacccgaaagcctgcatttacttttgtgaccggagattcttcagaggcgtcatgcttctcggctccatggaagtgctggaggacagaatctataaggaaatgatttggagggagggtgacaccatgtactacccggagggagtgaccgacccggattattgcgttttgcggtttaccgccacgcagggcagattctacagcaacttcaactctgaaaactttaatatcatataaagctttccacgccacatggccccacctcctataaaggattccgggtatggaggcagaacgccgtcctcccggaaaggttctccgccggaagagagaaaaataaaaacaatcatggtcgttgaggaggcatattccgataaacggccttccgttgaaattccttcatcgtaagcatgtggacttgccaaggcatgggaattctgtaaactgtttcgtcctcagacaacatcctttttcccaggttatgccagacgctcgctttcaaccacttcccggattccgtgattttgcaccggcggactgcgccgtgcgcaactatctctttaacgcatggaagagggtggcgcaccgctatggattcctggaatgggaaggcccgaccgtggaagccacggagctttaccttaaaaagagcgggggcgaactgcccacccagctcttccgctttacggaccagggagacagggacatcaccatccgtccggaactcaccgcctccctgggccgcatcgccgccgcctgccagcgggaatacaccaagccgctcaagtggtttgaaatcggctcctgcttccgttacgaaaaaccgcagaaaggacgcctgcgcgaattctaccaattcaatgcggacattcttggggaaggctccgcgtgggcggactccgaactgattgccctggccatcgactgcatgagggagctgggctttacgcagaacgacttcatcgtacgcgtctccgaccgcgaagcctggatcaggtttgccgcggaacacggcgtgcaggagcaggacattcccgccttcctgggcattgtggacaaatttgaacgagaccgcccggaagaatgccagcgcaagctggacgccttccacatcagccgcagcgacctgatggccttcattgagaaccctcccgccggagcctccgaacgctatgacatcctgctgaaagacctggaagcccgcggactggacggctacgtcaggctggacctctccgtggtgcgcggcctggcctactacaccgggctggtctttgaaatctttgacacgcagcgcagcctgcgcgccgtggctggcggtggccgctacgatacgctggtaggcgccctctccaacaatgcggtggacatgccggccaccgggtttgccatgggggatgccgtcatcacccacctcattgaccagaccccccatgccaaggcgctgaaggatgcggcgctggccgccgcgggatgcgacgtcttcatggtgcaggcctccgaaaaccgccgcgcggaaatgctctccatcgcctccgccctccgggaccaggggtacagcgtggaccttcccctcacactcaccaaaatcaacggccagctccagaaagccgtcaaatccggcgcgcgcgcggccctgattgtgggagacgaattccctgccctggaactgcgcgacctgcatgcgcgctcctcctccactgtcgccatggagaacctgtttgacgccctggcctccctgaccggccgtgattgatacgttccttcctcccttccattttcaacaaagatgaactcataccgcactcatacctgcagcgaattgcgcgctgcgaacatcggcaagccgaccaccctcatcggctgggtagattccgtccgtgaccacggcggcgtcatatttatcgacttgcgcgaccgctccggcatcacgcaggtagtctttcacccggaagtcaaccaggacgtggcgaaggcctcccagcagctccgctccgaagacatgatccagatatccggcaccgtggctgcgcgcctgaaaacggacacggtggacaccaccaatgcggaccttccgaccggggaaattgaagtctccgcggacaccctgaacgtcatcaacaaggcggacgtgctccccttccagctggaccgggccctctccaatgaagacctgcgcctcaagtaccgctttctggacctgcgccgcccgtccatggtccgcaacatgcagatacgccaccgcgtgaccaagaccacgcgcgactatctggatgaacacggcttcctggaaattgaaacgcccatcctttccaaatccacgcctgaaggcgcgcgcgacttcctggtcccctcccgcctggcacccggcaaattctatgccctcccccaggccccgcaacagtacaagcaattgctcatggtagccggcatggaacgctacttccagatcgcccgctgcttccgtgacgaagacctgcgtgcggaccgccagctggaattcacccaggtggacattgaagcctccttcatcacgccggaagacatctacaacctggtggaaggcctgctcaagcgcgtgtacaaggaatccctggacgtggacattcccacccccttcccccgcatgacgtggagggaggccatggaccagtacggctccgacaagccggaacgccgcttcggcatgaagctgacggacgtctcctccatctttgaaaacagcgggttcaaggtattcgcctccgccgtaagcaatggaggcgtggtcaaggccatcaacgccaaggggttcggctccgcctccgtcggacaaatcgacgccctgacgaaaaccgccgtggaagccggagccaagggcctggcctacatcaaggtgcgcgaggaagactggagaagccccatctccaaattcctttccgacgaagaaaagcaaaaactcacggaagccctcaacattgaaaccggagacctcgttctctttgcggccggtccgtgggaaccctcctgcgatatcctgggccgcgtgcgtctgcaatgcgccgaattcatggaactgcttaaggacaacacggaacgcgacttcctgtgggtcatcgaattcccgctggtgggctgggatgaggaagaacagcgctgggtggccatccatcaccccttcacccgccccgtcaaggaagacgaggaaaaactgctcaagggagaactctcctcagacctgcgcgcccaggcttacgacgtggtgctcaacgggacggaactgggcggcggctccatccgaatccatgaacgcgacttgcaatccgccatgttcaaggcgctcggcgtcacggaggaacaggcccgcgaacaattcggccacatcctggacgccttcagcttcggcgctccgccccacggcggccttgcgctgggcctggaccgcctggtcatgatgatctgcaacgcggaatccatccgtgaagtcatcgcgttcccgaaaaacaatcgcggagcggacctgatgagcgactcccccgccgctgcggaagagcggcaattgcgcgacattcacatccaggtgaaactgcccgctaaaaaataaccggaatctttaaacacaaacccccggatggaagtttttccatccgggggtttttcattcaaagagcttcctgcatccggaaccacgccaacggcaagacagaaatcccttcctataaaccgtgcccggcgcccgtcagacgccgccggatatccgccatctgccgtaaattcttcatgacgggcaaacggtgacgcttgtccagcggctgcggaggaggattgcccgtcgtcaccatggtgaaacgctggtaacccttcacctccggataacgtccccagtaatacgccgtccacccgctgtccggcgcgtccggaccaaagggagcataaaccatgtgccgttcctctccaggatataaattaaaagcgctggtgcctatcacaatatcttccggcgcgtccggcagcagctccagcctgcgaacatactcccggatttttacggccgcatacgccttcaaggcatacaggcagccgtaaacacgctgttccacggaaccgctgccccagaacaccatctccctccggtcggcaaaacgcagcaaatcatctcccgacaccatcaccgtatccgcatctatcttcaccagggtatccccttcatcgtccatgctccggagcatctcccccagcatcccttcaatacaggccttccccctcaaattgccgcctctttcccaaaaggacacgcgccattccgcccccagttcctccgcctgcgccttcacctcatccgggcaaggatggcgcccgtcgtcaatcacgaccaaatgggctccggggagggcatgccggacacacagcagattctccccgaccagggcggcgtctcccgaataaacgaacaaatgaacgtgaatgcttgctttctttttcatcatcaataactctatcgctggaattctttttcctgtttgcgatcatcatgacaggaactgccggacatctccatctgccgcaacgggccttgttcaacaggctccaaggaaagctccggcagggaagaaggagaaccagacactgcggcctccttccgcgcctcctgcttcaaccgcagcacgcccaacttgattctggaggccatattgcccaaggcattcgcccgggaaggaatcagccagccgccaagaacaccctgatgaaggaaatccgtctttgcggccagcacttctcccggcctcagtccggaaaacagacgcacccacagagccatcaaacctcggctgatgagagaatcgctatcggcatcaatccgcaccagaccgcctgcaagctccagccgcagccatacccggtactggcatccccgcagaaggcaggcttccgttttccattcctccgcaaagggcggcaactgtttcccctggcgcattaaaaaaccgtacagagccccctccccggacagggcggccagctcctgcaggagaacctgccgccgttcttcaaaacaatccatatgttcttattcgttatttgttaaaagcaattccgaccgttcagaaaaccctcttgaaaatcgacttaaccggaacggtccagctccctagcccttcaatacacactcgtcccgcgctgccatcatggaaccggacccgatttcaatattcaaaatccggcagggatgctggcgctgttccgaggcgcaatgctgtaatccctgaatcaaaaccctcaggtcacccgcccggtcatctattctccatccggaaataagcaaacgaagacactgcactgcctcatctccattcgtttgaaaccagatgaccatcgtttcatccgtggcgacgcggcagccccttccggtgagcctgaacattccggaatctccgatgcagtccatgctgtcccacacaacctccttaataccgcattccgcggaattcctgacggcaatctttccaccgggaaaccatcccatatggaacaataagcaccgcatcaggtaggcgcgccttaacgcacaatcctcctgatgggtgccaagaccgagcgacttcctggcgccgcagaacttgctcccccggtcaatggttagtctgaccttataacttccggatgtattcttccgcaattcgattgatctatagatggacatgcaaatattcatacaatatccaaaaactatatatataaaatcaaacgggcctagaataaaaatgttagaaaacagcacaacttcatcaaaaaaagcaatattagaaaactatgcaataaagaaaaaatcaaaatattccatatccagaacgcttctggcgttcatgaagaatcctgtgcagcagacctttcttccccctcccggcatttaaaaaaccggcaatcctttatagacggtctcaagagagctttctaagggagcttccacttggcccctccctatagtcaatcggagaaggcaggtcaagctgctttttctattccccgccactttcacccaaagtaaaaaaacattccttcctaacaagcagaaagaacctcaaaccattttaaaaacagacggcgaaagcctcttcgcttttcaagaaccaaacaggctttccgtgaatagccctcaatcttcacacacgattcgctccccggaagaaacgcttcaagtatcggccccatgccagcgaaaccaatccttccatgaagtccatatataccatcccatacacaagaccacaggcaataggacaaaaacagctctcctcaaaaggcaacatcatttaaaaagggaattgatactcatctccctctcttccaatagcattgatagtctatcctgacacaatggccaataacccgtagcccctggaataacattaggaaccacttgccttttcttctctgttcgcgttgtaccttgcaccccaaaccccgctttacccccagttcagaaagctccaaagctgtctgcctaataaaaatgaattggaggtgtaggacatgcaatccatgctcgttcccatcaactgagctccctatgaacaaaaaccgaggcacatatgtacctcggcgtataatttactttatattaaaaacttagataaagatatgatatcgcaatctcttttatcaacagtaattttacttttatccttatacatattaagaacggcatctacgactgcatcaatatattgctccgttgaatctgaccttgcataattttcccggcatattgaccgttatttcttttctgaaaatcaaccttcgaatttcatattttgtattgtcgattcatccggccgataaccagttattctcttaaatacgagaaacttacttcaagaagaagaggaattttctacaaatttagaaggatttatattttccaattcccctagcgtgtagctactttagtctatttgtctctcttgagggatcccatctgcgttagtctttaaatcccaaatgatctacctaagtacatttgtacgtcttgtcccatcgctcctttttattgctgtctagcacatctgtactatctgctgagatgctgatattacggataactaaaaacatcaaaacctatagatgaactgaaatgagtgccagtaatcaaataacacagtagaatcaatatattagttaatgtagtatattaagcccaaattctcgttacagtattcacaggaatagcgaaattgcattgccatagcttggatcatttctacattcagtgttactcttagatattaaaaaaatgaggttgctttaatttgataaaacaacctcattaaatgatgtaaagtcaataaaaaaaaactaatccttatcaacttgattcactattttatcataaaaccatttctgaaaatttttacattcatccaccgtcatagtttttttaacagtattaccattgaaagaatacaagttatgtattattttatgattttttgaatcttcataaatgcctaatggactttgcaatatttccgaatcaatcaagccggcatctactaatcctttaaatattttattcattaagtcaaatttcactaagctttttccatcaaattcatagatggaatttgctatgacattagcagttatctgatctacaatttgccgtaagagaatttcaatatccttcatatcacccttttctttcctcaatactgccatttcagcagataatgaaataatataggaaagtcggtctatttgttcctgacacatttgtatatcatcctgttccggatcacatacagaattctgggttgaaagaaaaattatactccaaacaatatttgcagcgaaaagcacccctattgcactccataaaaaatatttacttatattacatttcatgctagtttatcttaactttttacatttctcttcacattcttttaattttgacgaaaaaagcttattgaattcttcttgtttcttttcttcaatttcctctttttttggtatcttgttgatagatcccaatccgtcagtatatggattcccgttaccaaaggttctgctattaattgtaaatgaacctgtcattggagcaattgcttctccatacagcgcattttttaaccaaccttcacacttgcatttacacctacatgtaaattctacttttacgttcacctgcaaagaaagcaaaaagggtgccgctgtagtgaaagacatccctaaagcatctaatcctttaactgcggtttttacaagtttaggacgtttagtgtgcttttcaattactgcttcagatactttacgtacatatctttcggtttcccgtgtaccagcaaactcctcagtcactgtaatatcactagggtcctgtgttaaaacgcaaccatctccataccgttcttctctggaagaaaaagacagacctagatactcactaattgatacaggattattttttacaaatccatataaatggacaccacctttttctccaatcggatctctggatatccagcgaccatcttggggattgtaatggcggtaattgtagtaaatcaaacctaagtcttcgtcatggtactcgcaggaataaaggaatggcatagacgcagccttaattccttccgaactcaaggtttctccgtagggcgtatattcaaacttcgcctgacggtttcccgaggagtcgaacagagcgcttatgctcttgagcagatcgtgcgctacataccgggtggtggccacgctcttgtccgcgttgtgcgtacacattgccagtactcgtgtcgactccgattccgcaggatcccagaaccacgtagccaccaaggacggattggaggtattttgcgtgcagtccatgcttgctaccattaagtatcccatatacacgaatctggtacgcttggtcaaggcatttccatcatattccactttttccacacgtctcccaagatagtcatacacgcattccacttttctgtttccctgcgaaaaaataacaggcctattatccgcgttatactggacagaccatgttcccgtggatgtgttcaccctggtctggtttccatccacgtcatacgcaggagtaaaaaccgttccggaatgtgccactgcagtatgctgattcagattattgccctcataaatactggaaattcggttgccgatgttgtcataggcatagctaaaggaacctcccgcattcatggtgtctcccgtcaattctcctcgtgcattgtaatcatacgtatggcggcgtgaaagagccgttgaacctacataatcttcccgcacggaaggacgcctcatgctgtcccaagtatagacatgtttaaggtccggggtggcagaagaaccctttacataagtcagagatactggcaacggcagattggcatggaatgtcgtcctcttcaccaacccgtttggatatgataggctattgagccagcccgccgcagtatcatatccatacgcgaaagacgagccattgagcgaagccgtagcgagacgctcatcagcatcatattcgagttcgacctgctgtaccgttttttcattcagcgacaaaacatggcctgacggacgtcccatgctgtcacgctggaaggagagtatgctctccgtcattccggaagtagtttccgaagctatatcttccagacccgtataagtcatattccgggtaccggaagcgtcatgaatagttgaaatgcgttccatggcatcatagtcaatggatacggaaggagtcccatcactgtgggtgatgagcgccacctgacctgtgacagaatcatattcataagtagttactataccccgagcttgcgcgcgggttacgagacgccaccacttatcatacgtatacaacgttttggagccatcagcataaactttttccaataaaactccggtcgcaggatcataatgccagcatgtcacatccgaaccggaagaaggaaccgtatccaatattttccccgaagaacggtacgtatgcagggccacaatatgatcctgctcatcatactcccatttcatgggctggacggccgtgccataccgccgaaccaagcgcccccggaaatcatagatataccacatttgcttgccgtccggcgttgtaacacaagaaggctgccccgtcatggcatcatatgaagtagtagttacttttccatcttgatccgttcgttttatctcacgaccagcagcatcactaagaatcaccgtatcctttccgcgagaatcccggatggtgagggtatctcctcctgtaccatatatacggcagtattgggttgtggttccatccatttctgtcaggcgcaccaaatcaccgttcaagctgatttcttcggtttccgcgtcacaaccttcacgcccattcagtacgcgtatattgccgctctcattataaaccttttcccaagaccagcggccgtaagcatccttgtacaatgtcaacgaatcaaggaaagccaaagaggtattcgttcgagagacgagttcgtaccggtattcctttgcctcctctatctgcccgacaaaacatgccgccctttcttcacgaaatacgagaccttctacatccacgggaagtccagccggcaattccgacaattttttataagagatatggaaagaatatttactcaaggctccactctcggtaccatctttggtacgcattcggacggataatgtttgcaacagattgtcataaatataaataataggccaggaatttcctttacgttcataactcacttttccaaaaagctcataggaggcctcataaagaacttccctggaagaaggatcagaaggcgaaggacaacgtatttgcaaaatttgtcctttcccattttccaaaatttcttccaccacaggattcgtactggaatttaaccggatgctcttgattactcccgtctcatccatgtcgtatgaataatatttgctggcttgtcccgtaccggtttcccctgtcacaagacctgaagcaaatctccgggttatcagggtagccccggaaggagtcacttccgtggttgccaaaccatcctgtgaataagaatattgggcggttcttcccatatcatccgttttaaacgccatacgccctaagatgtcgtaccccatggaaattgtagtaactttatctccaatggagttggtgaccgataatgtattgcctgcgccgtcataagtcatttcctgaatagaattcgggcatgttcctgtcatttccatatcattccagtcctgtacgggaagtgcggcatcccgttctacccgtatcaggcgcttggctccatcgtagatataccgggtttgcaaaccccggatatccgtttcccacaaaggccctgcgcacccccactccgccagggaataaaggccattggcataatccgtcctaatgacacgatgggaagcatcgtaagacatccggcgcaggtcaatggagacaaacccttcaccttcgacatccacttgatgatcagtagcaacttcatccccgttttccgcgtaatagtgtactatccgggtagactgaccaggaaaaggagtatcatacatctgcagagtttcttcacatttccacgcagcaccatattctgaacacagactgtaggcaaatgaaggttcaggaccgttaatttcccatttacctttcaggcggccattggcatagggacaatccggatggttggaataccaactctgtccgtaatagtcttcccactgttgccctaaaaaagtttttcttacattctcagagtaaacaccgttttgttccgtataagaatacgtagtttgctccagtgtatggaaaatgccgcccttggttaacatgacatgttccatgataggacggcgatcattaaatttctggtcagagtacgcataagaagttctcatagaaatatccccataccacggctccgtccgttgaatcacgttcccgttggaatcatactccatctccactacggaaccgtcagggcgcgtttccctgatgcgtttgccgtaattggaggaagacggatcgctgccgtatccgtacgtccatgttctttccagcggggttccatatccttccgtgcgggagataaggacgtccccgtacaaacggcgctggtatacttccttttctgcggaacacaacacggcatgctcggttccggccacgccgctgtatacatacttgaatttttccttcttgtccgtgtagtaccctcccgccaccatggcctgtccgttaatatccttggcaaccaggttttcatggccggacgccggaaggcatctggtgacgatgctgatggcgtcatccccctctcctttcaccagggtcagatcgtccgggtaaaggcccgcgcgccattcactgataaaacctcccggttcttcaatacggaatgtctgcaatagcatctgggtcacttccggattttcttcatccacagccctggcgaccatcgtctccgtatctgcgaacgtccaggacagcttccatgtcttgatgggaacagctcctttgcgaatgatatacgtgccattgttatgccgccccgtcacgtctgcgggggcataccatctaatgctctgaacattgcttagatccaacaagccgtccgtcttgttccacacctgcttcagcatgaacagggaaagggaattgaaggtttccacctcactgccgggttcgtccgagacatcctgcctgactacctgaagctccgcggccagttcagcaaaggtgattttcacgccgcgcggcgtcacgatatgatcaaataaggcggaattggggcggaagcgcatggtcatgccgctttcctgaacttcttccagataggaaacgccatccaccacaacgcgccgcatcctgtccttgaacatctgggtaccgccaagaacctctgccccagaaacatttggagaggcaaagctgtaataacgcggaaatcctttttcagtcttcaccaccgcccgggaaacgtcttccggctcttccgggcggctgatggatgcattgagggtttcagccacttccagacggcgctgggaaatgtgctcgtactggaaagcggtcccccagcataacccggcatccatcatgttcaggttcagcatcaggcggcctccactcaattccggccacttgggaaagcgtccgaattctatggagaaggccacgctgttgttgtccgtacttcccgtaccggagtcgccctcggaacacgggcacgggtattccgtctccggccctatgggagtgacagggtaccacgtattgggccacggcatcggagacggttcatcattggaaacgaatgcaacgggatggctgggcattcctccggattgttccggagtggataactgattatcaatttctttcattgttttattgtcgttgaggcacctgccgggaataagggaaaacgccgccatgggatttccccggccccattcccggcagatgctttgggtcaggttcaggcggcaggttgacggtccacggaaacaggacggttacagatggcgttccgcaggcatctcatgacggagatgcgggcgcggcgcgccaccttgtcctgataacgccggctcatggagatcatgtccatgtccgccagggattccacagacggaaaggtcgtccagttgtaatgcccccacagggggcctccggttcctcgcgtccatgccctggcgaggagtggggccccatccgggaacagggcggtaaacgctcccaggatgacggcgccctccggacatttcatcacggaggaggattgctccagatgctggagaatggcccgaagcacagcaggcttcagggcataaagttcattgcacagcaggccggaccgaagacaggttccggataatcccgcttcggaacgggcaaattcccttaaaaaaccggcatggagaatgagattgtccggcttggtgcgcaccagcacatcatgttcatggcgcacagcctgagccatcagagccagaatagcggccgcatgttcggaggacgtatcagttttcttcagcactttccattccacggacatgttcctcagcacttccctgacggtttgggggcagcgtgcccggtcatcgtccagaataatgacagacgcttccggaacggcacggcggatgccctgtacagcttccaccagcagaggagcgttgtttgccttgcagggaatgaaaaagatgattcccggctgctccataggatcaggctgcggagaatttgatatggattcattcatacagataatcgttgagttgtaatgaaatgatgcgttgcatcagttccaaccttcattattcccctgtatgaatgcacgctgttttaacgggcctagtacattggtttcaaataaattgaggcattttcacggtggcaggaatgagtctgttttttcctctcatgcgtttcttccggcccttcctccgcgttgcccctcggcaagaaaagaaaatgaatacccggccccatttccaccgatatggacattatcacaagcaggagataccctcttctccaaccagccgttcaaactgccggaaaaagtctgcaactgcatccatttcatgctcccctcctgtcaaattatctctttcctctcatccgcacggaagactcaatatgctgaatcccataaaaaggcccttctccgccccgtacgtttccgccagccaaagcctctttgccgcgtgcataaagaagggcggtttaaatggacatgcaatccccttcaaaccgccctgccggcaggatttccataacagaagaaacagccggtaaacgaacaccgggtgccctgccttcaaagattttaccgcctcatttaccggaaacagaaggcaccgggccttccagtacggcagtagcgccccttggagccggtggcgctacctccaggaacctctccgtcaccgtctcttttctttcctccggatggtcgatcaaagagataacacggtccaccgcctcgcatgcgttggggtgcatttccttccgcgcctccctcacagcgctgcaagccgtccatgtgaattcctccgtatgggcatccgcctgtttcatcacaggcgccagaatcatgccctgataaatgatcgctccaataatgatcaccaggccgacacacccgcaagtcagcgcgcccctggcagaaccatacgtcctgtcatcactcctctttaccgctaccgctcccagaataatagccagaatggcacagagaaggccggggacaattgctacccaccccagacatggaagaaaggcgagcaacgcgagaatcaatcctacaatacccagaaccaatgcaagaatggttgaaacggtatcggggacggaacggcggggatccgagtagtttattttgttcatctttcattttttcattggatttccagacacggaaacgctctaatgttaaagaaagcgtgtaaaatctgtcaaggaacctccttgttgccccttaacggctctctcctgttccaacatccccggctcatgtcaaaacaaaggccgaacgcttctcaatgcgctaaaaataaataccatgattgcatggtcaatcatactgcttccctagttgcataccttcttcagaacatcgccagtatgacaaaaaacgcatgacacatccatggccctgcaccggttaggaagttgtttttccctttccgcctgctgttttttcatcccggaagaccatttttcttccccaagcctgccctcctccgccaacaccatgccagataaaacacggcagctcctccattgagcagcccagccataaaccagaccggagcgccccggttcctctcccatgcggcacgtatattcccgcgggccatttccacatacccgcgcgtcatgccgcacaaagggcattcccggtgcggcacggccacggaagccgccagtgaattcatcccggcaggactgactgtcagggccatgagggacggcgccaacaacaggaaggacaggatggcccatgcaggcagccacactttcctgatcatccagctattgcagcatgaacgccacgcagagcgcatgcaattcatcgccgtgctcccttgaaagcgtttcagaaactacaggtcctgggaacccgtttcatcagcgggggaggaatcctccgcctccctgagtcttttcaattgctcctggttctgctgctccatctgttgaagctctttctggatctcctgcgccttcttttccacataatcctggtgctgttccatgtaagtcacggtcgcgctggccatccatgcctggacaatgcctgctgcggcagatgccgccaacgcaataatggcgacaacaagagcgcccttgggagagcccttgctcacagccacaatactcatgatgagggcaataatggccagcagagccgcaggaatcagggtaatccagcccaggcacgggaaaaatccgatcaacgccagcaccagggcaataatgccgaggaccaaagcagccgtgcaggaaggggaaccgctgcagcaggacggagggggagaagaatcaggagcattcatcatcgtgttattctatggagttcagtgaaaattccctttggaaccttcatcccttcccttactggaagggagcattcctgtcaagatgcaagctctgccattccggacatccggctgtcattccacgcctcaaagcatcagataccccaccaccacagcggctgttcccaagaaggcgctgaccagcattaatttccgcttcccgcggtttttccacatcagcagaattccggtaacatacagtataatcagggaaagagccgccccgtatcctaacgcagtaaaccaccatcccgccttccccttgtgagccagcatcagattggggtaaatgccgggctccaccacttccgcccggagggcatggcctttcctgaggaacagcacatgcgtatccgtcataggacccaggaggtagttccctttgaacggccttacctttccttccggcaatgctactccgcggcgttccagttccctgcaggaatcctcatagggcggctggtcggcggcattcagctcatgcacttccacatgggaagtgaagtgctggtccacgccgcccatgtacagcaggccggtcacggcatacaccacgatcatcggcaggaaaaacaggctcaggaccaaatgaagggaatgggaagacaacgctttcatcattattcaagtaattatgttattatccgtggagcaactccgccaacgcttttcccaaccgcccgatctggacggtccgatgggccgccgttaccgtaacgcgcagacgggccgttccgcgggggaccgtaggataacgtatggcgggagccagaaaaccgcgttccagcaacgtacccgctgcggccagggcggcatcattctctcccattaccacggggaagatggaggaaacgggcctgccgggcattcccagcgcggaggacaaggcatccgccagcacggaaacatgacggcgcagttcctgcccttctgcactccggatcacttccaccgcggccagggcggcggcggccagggcgggaggcggagccgtggaatagatcagggaccgcgcagaattgatcatcacatccgcccaggcgcgggaacaggctacataaccgccgctcaccccggcggccttgctcaaggtccccatctgaaaatctattcgggaggagacgcccagttcctccgccaatcccgccccgtgttctcccagcacaccgaatccgtgtgcttcatccaccagcagcagagcgccgaattcatccttcaggcgcacgatttcctgaagaggcgcgcggtccccgtccatgctgaaaacggattccgtcaccaccaggattccgccggaaggattcgcgctccgcaaatgctccagcttttttctcaatgattccatgtcgttatgcaggaacgtggacaagcgggcaccggacagccgcgccccgtcaatcaggctggcatgggacagcttgtccatcagcaccgtatcctcccggtccgcaatggaggtaatcacccccagggaggttgcgtaaccggaggaaaagctgaccgccgcttcagtccccttcagatcagccagggcctcctccagaccggaatgcgcccggcgcgtccccgtgaccaggcgggaagccatggccccggccccgccatcacgcgccgcacgggaaaaagcctccgccagggccggatgatgagccaggcccaggtaatcattacttgccaggttgactacctcccggccgtcctccatgcgggccatgccgccgggcaggcaatccacattccgcagaacgcgcagcagtcccgcggacttcaactctgataaaaactgtccaggattcttcataagcgttctcgctccagaaacatgttagccgcccacgtcaaggctcagcactacattatggccgcccatggaagcggcggacttaaccagcatccgcctcccatccaaaggcaattcttccgcaacacaagccgcacctgccggggaacttacccagaaaggattaggtggcaaagccccctccctgataaaagccagcatcagggccagttccagaatgccgctgccgccaatggcatgacccgtccagggcttcatcatccttaaatccggaaagccggttccaaaaacccgttttaaagcggcccgctcggaagcggcattccccgccgttccactggcatgggggcagacggtcaaaggaacccttccatcccaattccgcagggcggcatccagcagggcggcaatgctctttccatcctccggcattcccagcgggctgtaggcatctgaattcaccagataatccttcacgtaaatgccgggaccggaagacaactccagcgccatggccgcccctccctcggaaatgcacatgccgtcggcatggggaccgtagggatcattcattccgttgcgggaaagcatcccggaagcccagtacgtccccagcagctcccggcacaagggcaaatccagcccgatagccagcgccctcctgacaattccctgacgcatcagcatggccgccatgcccacggcatccagaccggcggcgcagccgctcgccagcacgtggtaaggcccgcgaatccccagttcaatgctgacgcaggaggcaagctcactgtgcagggaattgggaacggccagaatcttcatggaccgccgtccgggccacgggctcagccagccggaggcgttcccgcgagaactgcccacaatcagggccgcatccttcaattcttcctctccccaaccggcttcctccacggcctgccgcgccagcagcagtgccaactgggaggcagggccgttcctgcggctgcataaaagcttcctgtccggaatccacccgctcaaaacatcgccccacggatgccccgctccccacagttccctcaacggcttcagcacgctgcgcccttccctcactccggtgagatgggctgccgcccccatgccaaagccggaagccagccccaggccgcatacccgcggctccggtcttccgtgactttttccccccgcaatcatgacggcggccagactactgccgcacccggaaaaactcaagcttccggtacgtcaggaacagccaggaaaaacggtacccctgccgtcttgcaacgggcttccttttatggcaatcatagtcccatgaccattcagaccgccggatttttatctcttctcttcatggccatttgccttccctccctctccttttcctcaccgcaaggaaaattccaggcggctgactgggcggtactccattcctcccggaacgaccagcggcacgtctcctcccgcggcgtcgtgcaaacaatgctggaaaacattcagccggcatgcgcattctctccggacatgagaccggaagacttccccgcctggcagaagaaagtccgggaagccatgaaaaaactgatgaaattcccccttcatgacaaccttcccgcacccgtcctggtaaaaaccgtgcagagggaacactaccgggtagaaaaatgggaagcctatcccctcccggacgctgcggtaccgtttctggtacttgttccggataccgcttcagaaaaaaatccggttcccgtgctattctgcatccccggttctgatcaaaccaaggaagaactggcggcggaaacgtctccggacctggcccagccccccgtaccgcagccgggcagcaatgccatggcctgccactacgtcaaacagggctgggccgccgtcgtggtggataacgccggaacgggagaggagggcgacgccgagcacgccgccggccgctcttcccacgactatgaaaacctggcccgttccctgctggaaatggactggagctggctgggctacacctcctatatggaccaatgcgttctggactgggtaaaaacacgcccctgggtgcagaaaaaccgcatcatcctgagcggcttctccctgggaacggaacccatgatggtgctgggcgtcctgaatccggacatctttgcctttgtgtacaatgacttcctgtgccgtaccctggaacgcgccaaagtcatgaccatgcccagcaacaggggagtgcgctccgcgcccaactccatccgccacctcattccgggtttctggaagcagtttgactttccagacattgtggccgctctggctccccgccccgtaatctgcacggaaggcggcctggacagggacttccaactcatctccgcggcctaccgcacagccggagcgccggaccatttccagtaccgccaccagccccgctttgcagacccggcccaacgctggcacggagaacatttgcccgcagggctggacagagacgcctttttccgcctcgccaatgtggacccgagcaaccacttcttcaaaaaagacctggtcattccctggctcaagggccttttaggcaggggacagcaataagcgggaaaaccatcccgttctcaaacacgagttgtgcggaataacggaacagaacgtttcccctgccttcaggaatgcagaaacaatctgcggcacactttccggaaggcacagcccagcttcccgaaaaagccgacgactgcacgggcttccctgttaacgtccatagtcttgaataaataacgccgtacggcatccaccagggagcagcctgcatacaccgcaacagccattgccagtaccttcacgaccatcaacgcaggggaagaagacgcggcccattcaaagacatcccataaaaaccatttgcctatcaaaacattgcaatgcagcacataaacactgaacgaggcggccgccagccatgaaatgcaggcaaccgtcctgcgggatgaaaaacgcatgcgggaaaaaatcaggaacagggcaaccgccgttcctacaatgaacggagaattataggcaataaacgttccgccgccccttatctgtccaatcaggtacggggacaccacgtcaagaaccatcttgaacgcccagacaaaacatacacacccggcataaagcatccataaggcgcccgtcctcattccagtcaacaggccatgctttttaatatacattcccagcatgtagagaacgcccagccaccagatggaataccctccctctacaggaaacacatccctgtgaagcaaggtgggaaccacggaaaacagaacaaaaacggtaaccagaagatactggaactgtgatttggtaagccggttccccaggacattaaggaaaggaataaagaaaaacagccctacatacgccgtcacataccaatactggacggttaaaacgggaaacaacgaattcaggacgtcattaaaatgaaccacctgggaggaaaacagcagcaccagcagcagactgcccgccgtataaaaaatcacctggaaccataaggtaaccacgcgttcatacctgaacgtcccgtcacaacatacatacccagtaatcagcgcataacaattcaccccgcaataggcggcaatctccagaagccaccctacccggtaggaagcggaatcatgattgtccagcggcaatacatgagtggcggccaaaagatgaagaaccaaaaccagcatcatggcgacaatgcgcaaggcgtctattccataattccgcgacaggggaatatccagaccaccataggaagaaggctttccttttccctgatcaccagccgacagcaagctcatggggatatttcaacggatttcttatccgtggtcaagttccaagcttgagggaaaagtatttgagaaaaaacctccgctggtttaagggtattccgccgggaacggcaggcttccggctttcggataaagcataaaatcccaggagggggaaagcggcatatcctcctgttcatatatcttttcaagggccgggaggcccttgttcccagggatttcctattctttttacacatggcggatcatgctgcatccctgtgaagaaaggcttttctttcggaaaacctttccatcattgatgaaaacgcggataagaaatccgctgcccatgatcaggcaatccggctgtccaaatcgaacacctgcccggaggctgccgtgaggacttcctgcaaaaacagaataaacgccgcggcctgctccggcgtattgaacctgcccagaacatgcctggacaaagcagactccttcacgctctccctcaacccggccgtcatctccgtcagcatgaaccccggcagcaccagattaacgcgtattccctcccttccccattcccgcgccaggctcttcaccaggccttccagcgcagacttggaagcggcataggccgcctgggacggagccgggcgaagcgccgcataagaccccaccattactacctgcccctcccgcttctccctcgccatggctgcggcggcacagcgggcgcaccaggcggctcccgtcacatttacgttcatcacctcgtcccactccttttccgtctgtttcaggaatggcctgtctctggtaattccggcggcacacaccgccaggtcatacggagcatgttcgtcaaaccagcggcgcacggcggaacggtcccctacgtccagttcagcgtgtgacggagcatccgcctcccatcctgcggcggtaaaacactccacggcagcccgcgccaaaccgccgtggccgccgctgataaacatccttcccatgctggaacctctccggaatcgttaaaagcctcacttggggtccacccaccgcccgtactccttgatcaggtccaccagccgctccacggcctcctcctggggaatgttgaacttgacgggggtgtgcttcacgtacaggttgatcttgttcggcgcgccgcccacatagccgaaatcggcgtccgccatctcgccgggaccgttcacgatgcaccccatcacggcaatcctcacgcccttcaaatgctccgtggccttccggatgcgggccgtagcctcctgaatattgtacagggtgcgtccgcaggacgggcaggaaacgtaatccgcacgcgtcaggcgcgtccccgtagcctgcaaaatattgaatccgaggaaggaagccagccggggatccgattccccctgaatcagcacggcatctccaatgccgtcgctcagcagggagccgatattgcgggcggccaccagcggcacgtcctcatcggaaacggaaccgggcaccagcgtatccttcagcagaatcaggtgcctgtcttccatgcgggaagccagaaggcggaacgcatacacgggttccatgtccaggccgttcttcacggtgacaacggacggttcggccagttccttcagcggctccagctcgtcaccgcagcgggggtccacctcaatggcctccagttggccgaaggccagctccggcatcatgtcccccatcgcatcccgttccgtctggagggcgtaaaaccccgcatccggcaccaccacgcgcacgggctgctcccagcccaggcgcaccccgtaacacatcgccagccctccctgccttttggaaaacttcaggggatcatagctcaactccggttcggggaaggaagaaacgggatcatcggaacgctccgacggctggaacggattggacaggcggtaggccacaggcacttcccgcacggcgtcctccgtcagggaaacgcgcagggtatccccaatgccgtccgtcagcagggacccgatgcccaccgcgctcttgatgcggccgtcctctccgcccccggcttccgtcacccccagatgaatgggataattccagtccggccccagggcattcatgcgttccaccagcaggcggtaggcggccaccatcaccttcacgttggaagccttcatggaaaacaccagggaatggtaatccaggtcccgggcaatctgagcaaactcaatcgcgctctccaccatcccctccggcgtatcgccaaagcggttcagaatgcggtcggacagggagccgtggttggacccgatgcgcatcgcgcggccatgctcccggcaaaacagcaccaggggcgtaaactcctccctcaggcggtccagttcctcacggtattcggcgtcggaatactccctcacttcaaacttcttcttgtcgatgaaattgccaggattaatgcgtatcttctccacccacttggcggcctccatggcggcgtccggcttgaaatgaatatcagccaccagcggcacatggcaacccgccgcgcgcaattcacgggaaatattctccagattggccgcatacgccttggtctgggcggtcaggcggataatctcgcaccccgccgcggccaattccagagcctccttcacgcaggcatccgtatcccgcgtatcggacgtcagcatggactggacccggatgggattggagccgcccacccccacatcccccaccatgacttcacgggtcacgcggcgcgtataacggtaaggactcggacaataggaagactgcatgaaaccactctaccgcgccagattcccctgtcaaccatccttcaaaaacggaaagccttttcacgtcaacccatcaacattgaaaagggaacggagccgttcccgctgcacgaagacttgatacgctttacagcaaattaactataaccaagaataaccatcatgtttgaaccgctcaggaatgtcttcatgcgaatagcagaaaaagagcaggtaaaactcccctcaacaacaccgggaacaagctttggcttgacacacaaaaaattaaccctggaccacatttcctccataggagtcaaggcaggactctaaaaaagataaagcactgccggttcccactaatcgcatcatttcatcaatccctgtaacttctcaagttacccataacggcaacggcatcaggaaaaagagcgggcatcagacaagtttttccgcaactaaaagcccttctgaatccggaaccgggttacaacctgggaaatgcggttacacttccctatttccctgcatcgtttgggcagattgtataaagtggttccttttaacatcatagggctgcgttatttctttggcgcttcttcccattgcccggactcgaatcaccaatcgacgcacttccaaacttgagctattttgccaatattcgctaagcaattaaatttcaatcacaagaaacctaccgtgtttcttcgggtttcatgaacaactgcatattcttaagcaaagcttcgtccatttgttttgccaatggcaaaacggaaatatccatcgtctcgtttttcagcataacggccgtattaccccgtatgaaactaattgaggagtattctccctggggtacggggactcccaattcattgattaccggtttgaggcagacatcgtaatctcccaccagaccgggatgtacctgcaggatttttttcaggatatccggcttgataagttgttttgattgctccgcctgcatcgcgaacatcgctctcaaggcctggtctttcgtatgaagatgcagaatcgtgtaggtgacgggataatcccgtccattcttgttcacgctaaaagtaccggaacatccgttgatatgagattcgtcatgacctttttccgcaataaaagggatatttacgtgcttcttgagccagcgcaccgttccgatgccgctattaatattgggtatcatttcaggccccttgtcttcgttcccgtccggcatattcaggttgagaatattatcattccgttgcagctcacgagcattccgatcaatcctgtcgtataagccctcgggcatgccttttgttaatttccttaattcttcttcacgcctggtcctcttttgataaggcatctttgaaatatccttccactttttcaccgcctgccgcgtccttttcggaaaatacccgaattggcgttttccattaagtgcggcgagtatagtctctgatatttcaaaaagttctttatccttaagctcttttctaataagcggaaagaaccagtggtcagcggcaatgagggaaaacccctcctgttctgcaaagaattccccacataattttttatcttcgtctaaaataaacgggacttgcagaaatgccatttttataccgtcaccaaacatggtccatcggtattcacggttacggttgaccggaggtccctgtttttgtgagacaagcatttcatctactgctttctgacgactgtagacggggtttggggagtagaacattttgacggccatgtagacgtttcccatgatatcgacaatgacccagtaattctgctcatagtcccatcccaggtagtactgagatatattgagcccttccatgtcttttgccgcctcggactgtccaggaacaggattcccgcctggtttaatttcctcatacaggttatacagacgggccttgcgctcagcaggattggattttatggtggtctggttccatactgcggccggttttatttcccagactgtttggccgggatacaggtcattccctgcaacaggcgccccatgaagaatctgccctatgagggttacggcaatgaagaaaaaggggagaattttcatactgtgcgtgcaagtcatgatggttatttgttaaatgagaagtagcagccgccaggttcggtaaaattactcctgttttcatcggatttcaaatcgtcttttatgtaatcactttccgatttgttggtaggacctgcattgtagggaacagggttatgtactttacctccataaaggcaccaggcatggccggagcgccaggattttgtctcctcctgtccttgtgcgtttgttgtttttctagtttccgtccacccgactcctctggaactgactccgcccgagccgagaaccgacgcagaatattccataagaccggcagcttccacacagatgatttttgccgttcctttgtcgatggcatctaccattccggctaccgacaagggcatggggttttgtttctgatccacatacagggagccggtttttcccacttccgggttccattcatcgtaataagaagcactgttggatataccgcgactaagcctgtccataagctgatcatgggtggtcgctccgctgaagttccacttcccaaaagctgttttcagcagggttttccaaggcttgtccagattacccctgtcaagaagaacatagcatttgctgatggtcatttgttccttggcggataacttcactcccagaacagagaaactccaggatgcattttctgcgcgtccccggcattttctctccacggcttccttggcggtgacgacaccctcggcttttccattggcaatggacaattcagttgcttcagaggcaaatattccgtcggtgcacgttgccttgattgttttcatggagtccggcagcgccttgaaggtgacagtaaaggaaggaatatcccctgcatagtaccctacgggtgatttatcgtcatccggtgttttatcctcccttttgaattccggaaccggaacaggcttccctctgaattgatcgtgaatggtgaaaccattgcccccggcattttccctgaacttggcgaactgtatttgaattaacggagctatggcatccatttcatcttcggccacctctctttttctctttggaccgaccacccccatgttcaccttaactttgaccttgaattcagttccccagtattcttcactgggagagcaaattcccgtagaagaaaatcctccctttcccctgggagggtcgctcgtcatgattggcgcaggttcccatatatactttcttgttttaccatatcggtattctacccattcctgttctgagtcaggagtaaatttggcaacagctttaaatttgtaaactttgccttcctgcttgtccagtatggctttatccccatcttcggacatggcgacattctcgccaggagttatttttacttcgcacttgtaatcctccgccgcgtgtaacggcatcagatgaaacagtaatgccggcaagaagatggcagtaaataatttaatgctcattattttttattctttaaccattctttcatttgttgaacgtcaagttccggtttcttgtttgaacccggcaaatactgtttccaatcaattttcaaagcggacatttttctgacttcatcgactgaaaagggaatggtggtatccggcgcgaatgtagcccattcagaagatctgtagaaatagaccgtatcctgcaaactggcccacgcttttttcatttgttgccggaagtccttcctgtcctccgtttcccatattttcagtctccatctccagttctttttgatttcatctggagcctgggtagcaagaaggtgtctgtaggcataaattccaagttttcttgatgagaagatttctttcccgtttaacagcctcatgtcttggctggcagcccataattttaagaggctagaagaaagtttacttgcctgctcggagttcaaaggagggggagatggtatgcaaagcccatagtagaatgatttttgatttagtctttccaggagtttgtcgacagcaattttcgtttcgtccagggatgagataaatactccgttgagggttgtagaaactgagtagtttttcaatattctgacgtagtaccaccctgagccttcgacgatgaaattcttgtaaactccacatccggcaaatgatttaaccctgcttcgcgccagaacaggcaggggtatgtaatccttaagcccgtcataggaaggttcccggaataagtcttcttcctgaacttcctcctcttttccaagtcccaggaaggagtcaaaatcaaaattggcaggtagttttctgatttcgagtatgtaatccttgaggctgttgtccagatcattgtcggcaagcggggttggatcataaaaataaaaggagaggagctgttttttgtccggaacctgaatcagcacgccaaggtccggaccgtcaaagtctctgtctacggattctccccggtcactccaccgggcaagcgttctggtcgtgctgatggggcagtaaaggatgttttcgtcaccccgttcattttcccagataacttttccggatacaccgctttcacccactttgacgtgtggacccttgacggattcgcatctgtatgcattgtcaaaagcctcaaggacggaacccataggaccggcagctccgcacaggagcatgtaactccgtccatagcgttcgcaccagtcgccccgggtagcccagtcttcataccagaaaagggcttttgcagggggatttgtttttttcattccatcaattgctgtcctggtttttaaaagttccgacagttgtccaatgcccgggaaagaaggatgcttcacatcattcaacgggaaaatccgttttctctctacatggcccaaatgcaataatccttttccatacgttccggcatacaagctgccatccggcagagaagcaaaactggtcacgctgaccaatttttccacttcatcgtcacagggcatatccacagtctgaattttttgtaaatttttccgcacaaaagaaacgcccttttccctgaatcctatccacatcccttgggaagacggataaaaacaggtgatataatcctccggcaaaagagaatcgtcattgttttccctacggttcattttcaagagtttttgagcatgccggacagacgttttctcatccggtttccatagtccttcatttttcgccccatagtccctgcccctcagaaagttccagtctgttttatttttagagtacccgagtccggaattggtgcctacccaaatccagcccgattcggcacaaatcgcgttgcaaaaatttgaaggcaggcctttccctctggcttcaaatggttggcgaactctctgcagcgtatcccaataccactttgtctgcactacattccaccgtgaatatccgttggaaggttctgctgaagccactccggaagtttgaaaagctgcccaaagagttccttttcgatcaaaggagagagaagcaatctggtcctccggcaaaccttccgcccttgtgtaatctttccatgattccgtttccggttgataaacagtcaggccgccggaagtagcaatagccacatctccactgacaggagatacagccatggcgaagatcctctcccccggcaaggcatttgactggttgtactgttgccatgatttcccattccacacagccactcctttattgtctgtccccacccagatacgcccctgcctgtcttcgagaagagcatagaaatttgttgtatcaggcagcccgtttcctttctgctgctcccatttttcccctccgtatggcaagcgcatcaatcccttcccttccgtcgcaacccaaatatctcctgaacgggtgcaaacgatagacgtaataaaggaagctggacaagcaggcaattctccgccatttgaaggaatgcccatgtataaaaaacaatagatccaaataaataaataagatctaacaatcagaaacataaaaaaatagtaaaataaacacgtaaaaagtcaattgttaagtctacttgccaaggagcgcaaaaaagatgactgagccactggtacagatccagttcaacgaaaccggcccagtctgctgaaaaataactaaactaaaaatgaacccctgaaaagaggaacacgcttcctcccccccggtttgttgaaaattaattcattggaaataaacgtagaagatgtcaacgacatcgaacttgactccgcgagaaatagtctaagccgtttttaagtcattaatttcatcatcaacaattcctccgggacatttcacaagcataagcttttcccaaatccgcggcatgcttttccgcccctgcggaaagccggatggagccggcaggcggaatgccttcaacgcagggcctgtcctccatcagcccgaggatttcatccctggtcagcatcacgtcacgatgaagcatccccatgatgccggcgacggcataggcggcccacagaggaacggacagtaccggacgacgggccccgtcacctttcccagcatggaaaacaatccgcgggacgtatacgtttctggcctcaccgcttcaatcacgctgttttacccgtcttcccgcaacgcttcccgggaccgccaggagcggtcaaatcctgtacatgaaccggcggaaggcggttttctccattccccggaaaccgttacagcatggactgcaccacaaacaacacgacagaccccacataaacggccgccagcaccacggcggcgcaacacaggaagagcctgtatccacaggccagtaccatccttctgagctgggattccggatgccgccgcgcccaccacgcatacagcagaaaaagcacagccgttccggctgaaacaaacagagattccttcaacagaggcggataataatcaaacaccaccctgttccgcccctcctgaaggcgcaccgccatcaattcccccaccttttccacgggcacgtccaccccgttccgcgtggccttccatccacggtcatgcaccaccggaaccatcagcgcctccccctttccggcagagagggacacttccacatggcctccgcgtccgtgcgcctccaacccgtattgatcctggcctttccccagaaccggaacatcctgctccggcattcgcgccgcagccgccagaagaggagcctccaccagccgccgcatccttccctccaccacggtttccccggttacacccgcacgctttaattccaatgctccattataggtgcggcacgtcccgccgggggccttctgcgcttccgccatgacgggcaccgcgcggccattgacgcggagttcctccgtatccgtctgcgggaagccgtacaccgcgccgggatattccggcacgctcatccggtaaaagttgccattcctctccgtccgcacttctacgggagcatacagggggccttccgctgacgggcaaagcgcggcatgcagggcattgagattgctgaacacgccggcttccgcatccagccgcagccccagcgcgctctggggaaccaccagcccccagcgggcgcccggaagcctgtataaatacatgccttcccgggaaagcacgctctccattccttccacgggacgggacgccagcaaaaagccatggcccagcagcagatcggaaaacagggtgcccccctgaccgtacgtgcgtgtgaattcatcccggtaccccaggtttttcagaaaacggaaatggctgatgctcgtggtatgccggaagttgccgatgctcgggacaggccccaggcaatccgcgttgtccaccagcaggcggtccctatctttcacgcgcagaagcccggcgtacccgtccattccgcgcgccagccattccgcattcagggccagtacagcggccttttcctcttctccctgcttccagaacgcggcagcccccacgggcagccccagcagcatcacggcggctatggaccacaccagccttttgccttccacatgcctccagcacagccatgcgcatgaaaaaaacagcagaggcagaaggcgcgccaccaggtccatatccgtcacgtgaaggacaatcagggagacggcaaacgccgccacgggaaggccaagactccatccccagccccagcgccgccccgccgactgcggcagcctcccaccggacaggatccaggcgcagaacgacgccaccaccagattgggaatgaacccgaaccggaccggaaaatccacgtagctccacagatgggcggcgcggtgaaggggttcaatgaacgcagggagcatggacgccgccagcaggagaagaaacagccgcctccccctgttcgccggcggagcctccttcctcccgtaaaccagatagacggcagccaaagcggcgcacgccattcccggcaggcaggcatacaggcgttccaggaatttgggagggtcaaacggccaggacagttcaaaaaaagtggggggagtcatgaacagggaccgcatggaatcccggctcatctccatcatgggcagccagtaatagcaggtcgccagcgtcaccgccgccgtgtaccagaacacgcgcgccagccggacgcggcgttctgccgtccctttcaggggaagcgtaaaggcccacgcgaacagccagccggtcacgacggccatgaaagcgctgtacatggaggtagccagcagaaagaggccgacggcatacagccaccccctccctccgttcaccagctggtaaaggcccagggcaaacagggggaacatggcggcgtggtccaggaactgcatgaacccgtacttggtctggaaaaatccccccagggcataacccgccgtcagcagcacggtccagcatacgggcagggaggggaagacgcgtctcaggaaccaggaagccgtcaggcagatgcaggccgcgtccgccagcatcacccataccatgtccttcaacaggaaggagtctcccatcgccaccacaatccaggtggagggaactagcagctggtgcggcagggaggggctcacgcggatgcccgctcctccattgacatcataaaagaaggatccgtccaacgctccggtcatcagggcggaggcataatatttcaaggtgggatacaccatctgcccgttatccatgtattccaggtaatggccgccaagcggccaaattccgcgcaccgccaggaacaggaacagaacggccagggcgaacgcaacagacgccagagacgtcaataccgggcgggaagaagcgggttccatggctcaatcagcggacaaacggttcggcggcctggaccaggcgcagggcgcgggcgcattcctccacatcatgaacgcggtgaatacgggcgccgtgcaaatgtccccataccgtcatcacggcggtgctcagcggcgcccgcccctgctccgcatcacccagaacggctcccagcatgcgcttgcgggaaaggcccagcaataccggacgtcccgccacctccagcctgtccatattggacagcagggccagattgtgttccagcgtcttgccgaagccgatgccggggtcccagcaaatctgctccgggaccaggccgcggcccagcagaaaatcataacgctcctcaaaatagccgcgcacctcccgcaccacgtcttcataaaaaggcgcgttctgcatcgtttcaggccgtccctgcatgtgcatcgccactacgccgcagcgcgcctccgcacacagctccgccattccctcctcctgcaatccggaaatatcattgatcacgtccgctcccgcttccagcacagccgccgccacggcggcatggcgcgtatccacggaaatcacggcgtccgtgcatgggcggagttcccgcaccacgggaagcacccggtccagttcttcctccacggagacctccgccgcacccggcctggtggattcccccccaatgtccagaataagggctccctgccgctcaagctcttttgcatgggaaacggcgcgttccaccgtatggaaacgccctccgtcggaaaaggaatccggagtgacgtttacaattcccatcagcacgccgccgcgcgccacattcaatatgtctcgccttacaagccagttcatctaattacgttcttgtcaaaggcactatacatcactttaataagtcagaaacacttttttcaccatgaaaacaacgcccctgcttctcatcatccccctgctcatgacggccggagccctggcggccagccaggatgatttcaacgtccagaccgcttcctcccgcatggtcaagcatgaagacgggtcgcgcagctactttgaaaagaccggggacggcaaggggatgaaaaaaaccacttacaacatccacaacgttctcgtttccgtaaccctctacaaaagaggcccctttggagaactgcgctcatgcctgatctttgacgggcagaagaacgaactctttttcgtacgctacggttacgacggcaacgccaacctgagggaggagcaaatgttcgattccaagagcaaggaactcgtgcgccgcttcctttacacatatgacgacatgggcaaccgcagcaagcccgtgtgcatcacgctggtcaagagcaccaaggacattgagacgcacgccgttcccaccgctccggaaaaggacccctttgccgccgattttaaaaagaagagcaagtaagcgccggaccctcggggcaatggttccccccttcgcgcatgccatccgttttctccgtctttcaaccggccgccgtctctgtgatgcgcggccggtttgacgttataccgccgtgcgggaaaattgcggcgagttccggagacggacgttttctttccccagaaaaagacctggtccaaaggcatgcccgaggtttgaaacacggcaaatccgcgccaaccaccctggccaggcgcacgacggcccatttaaaggaggaacagcttcctaaaaagccattttattctccatcgctggcttccagcctgttacgccagcggcgggccacccaggggcgcaccagcccgtaaagcaggtaaatggagaaaatgaccgcgggcatcacccacgggaatttgaagatgcagatgaccgtcagcacaatgagcacgatcgcgtacatagtcccccgcgtgcgcatgttgatgtgcttgaagctgggataaaccacccggctcatcatcaggacggacacccccgccatcgccagggcaatcacgtacttgaagacgcccaggtccatggccccgttcggagcccttcccgccaggtacatcaccaggtacatggtggaaaccacggctcccgccgccatcggaacgggcagccccacaaagtcgctgctctgcccctccttgcggggagcggcggccatgcagttgaaccgcgccaggcgcagggcggcgcacagcaggtacaggatgcctatgccccagccaacctccggcggagaaagctggaacaggacggccttggccaccagcagcgcaggggcaatgccgaaggagacgatgtccgccagggaatcgaattcccggccgaaggggccgtcctgcccgcgcatgcgggcaatgcggccgtcaaacaagtcaaacaggcacgccgcgaaaatcaggaacgtggcattctggtaataggagaaggccgccacggcgtcgctgtccgcctggttgatcccttcaaaaatcgtcagaatggcgaaaaacccgcacaccaggttccctgccgtaaacaggttcggcagaatgggaatctcaggttcgtccggaaaaatcttcttgtccatgatcggtgtccagtggggcgccccgtgaagggcttacccgttaatgatgttgcgggccgccgcggccagggcctggggatcggcatcctgcggagcggaaccgcgggcctggtccggacggccgccccccttgcctccggcaagagcggaaacctcgcggatcatatccccggcggacaatccgtccgcaatggcatctttgccacaataagcgcccaggagcaaggaagaactgtccacgcacagcaggaaggcggcgcccgcatactggcgctttttcaggccgttcagcaattcctgaagcaattccccggccccttccgccacctggatcagggaggcggggtcatcggaaagccattcattcagcagggcgtcagccctggcggcggactgcccggcgcgggccttcctaagcttcttttccgcctccagcgctgtctgcttgaaatgctccacggaggcgtcgaaacgcgccagggaatcattcaccgtccggatgtcggaggctcccagggcggacagccccggcttgtcttcaatcgtgggaaccggaacctgttccagccccatgtccgccagctcataattgacttccttgatcttttccaccgccttggcgatttccaggctccgggcgacgacgtgctggcggatcatttccagggcggcgtcccccgtcatggcctcaatgcggcgcacgccggaggcgatggccccctcgctcttgatcttgaacaggcctatatccttcgtattggccatatgcgttccgccgcagaattccatggaaacgccgtccagttcattcctgcagccgcccacctggaccacgcgcaccacatccccgtacttgtcgccgaagaactgggcaatcgcggaattgccctttacgtccgcataggcgcgttccgtgcagtgcaccgggagagccgcctcaatccagccgttcaccttctcttcaatcaggcggagctggtccggcgccacggcggcgctgttaaagtcaaaacgcaggcggtcttccgaaacgaaggaaccctgctgggccgcatccgggctgactacctggtgcagggcgcagtgaagaagatgggtggcggtatggtgcgcctcaatgcggcggcggcgttccgcgtcaatgctcaaatgcacgcggtcgccgggtttcacgtccagcccttcgcgggcttccaccacatgggcgcgggcattgccgatctgctggacggccatcacatggtagctctccccgccgatttcaatcaaccctgcgtcagacacctggccgcccatctccgcataaaacggagtcttgtccgtaatgatgaacagggaatccccctggctgctcacttccagcaccgtggcggcgcattcgtccacatcgtatcccgtaaatcccgtcacggcgtccgtcttcaaatccagggcgcgcaccacctcgctcttgcgggcggcgcgggcgcgttcccgctgctcctccatcagcctgttgaaccgttccatgtcgatgtccaggccgcgttcctccgccagcagcgcggtcaggtcaatggggaagccgtacgtatcatacagcttgaaggcgaactcgccgctcacctttccggcggaagccgtctcagcgtcaaacagatccaggccgcggtccagcgtttcattgaagctggcctcctcacggttcagaacttccttcacggtggaggcgcgggcggacagctccgggaacacctggccgaaggattccaccagcgtatccaccagttccgccaggaacggctgggtgaagcccaggcggcgcccgtagcgcacggcgcggcgcagaatgcggcgcagcacgtaattacggccattgttgccgggaagaatgccgtccgctatggaaaaactgagcgtgcgcagatggtcggcaatcacgcggaaggcaatcgcctcctgaagggtgtcgtcccccgcctccactctcttggaaccgggcgccggatacacgtccgcgtacttccggccgctcaaggcctccagacggtcgaacagggggcggaacacgtccgtggcgtaattggaaggcttgcgggaaaaatccctgaacccgtccgtgcactgcatgatggagcacgcgcgttcaaaacccatgcccgtatccacgtggcacgccggcagattgcgcatggagccgtcgctctccgcattatactggataaacaccaggttccagatttctatgcactggtcggaatccttgttcaccaggctgcccttcgtattcccctccggggtcaggtccacgtgcagctcggaacacgggccgcaggggccggtttcccccatcatccagaaattatccttcacgttcccgtgcacgatctgcacgtccgggtccaggccgcgggaacggaacagctccgcccagtaatcccatgcctcctggtcaaactccccggggtcgcccttggtcttgtccggggcgtacacggtggcgtacaggcgttccgcggggaatccccaccgttccaccaccagctcccaggcccagcggatggcttccttcttgaaataatccccgaaggaccagttccccagcatttcaaaaaacgtgtggtggtaggaatcataacccacatcctccaggtcgttgtgcttgccgccggcgcggatgcacttctgggtgtccgtggcgcgggcgggcgtccaggggggagtccatacgcccaggaaatacggaacaaactggttcatgccggcatttgtgaacaacaaaccggggctttggggcatcaaagaagcggagggcacgaccgtgtgctgtttctcgcggaaaaagtccagaaagctttggcgtatctcggtggcggtcatcatatcaataataggaaaagtaaaagtcgccggattatgcctgttccgcccccgttagtaaaccgctaattccttctccgtcatgacggctgcatttttgcttgtaataaattatacatgcgtataaataaagacatgaaaaagctggtgatcctcctgattcttcttgcggcggcaggagcggcagcctggttcatctaccgggaagctccgtccgggcctgaggacaaggccgttctttacggcaatgtggacctgcgccaggtggacctggccttcctgatttccgaacgcattgattccgtgctggtggacgagggagatacggttgttcccggccagaaactcgccacgctggaaacggtgcggctgcaacaggccgcggacgaggcccggcaaaccgcggaagccgcccgccagaactacctgcgcgttaaaaacggaccgcgcgcggaagaaatagcccaggcaagggcgaacgtgcaggcggcggaagctacgctgaacaacgccggggtgcgcagcaagaggctggtggctctggctgaaaccaaatccatctcccgccaggaggcggacgacgccatcgcctcccagcaggtggccgccgccaatctggacgtagccagaaaacaactggagctgctgctggccggttcccgcgtggaagacatcgcccaggccctggcccagtacaaccaggccaaagccaacctgaccatcagggaacagaacctgaaagacgccgtgctttacgcccccagcaatgccgtggtgcgcaaccgcattctggaaaagggggacatggcctccccgcagaaacccgtttacaacctttccctgaaccataccaaatgggtgcgggcctacctcacggaatcccagctcggcaaagtgaagcccggcttctccgccaccgtgcacaatgacagcttcccggatacggacttcaagggaacggtgggcttcatctcctccgtggcggaattcacccctaaaaacgtggaaacgccggacctcagaacagccctggtctatgaagtgcgcatcatcgtggacgacccggacaaccagctgcgcctgggcgcccccgctaccgtcaccatccccctggaccagaacgccggaacgcagcctccggaacagcccaggccatgactacggactcccagcccctgattgactgccggaacgtccagaaaatgtttccggaccccgccggcgttcccttcgcggcggtggacggcgtttccttccgcctctccgccggggaaatcgtgggactgctggggccggacggcgcgggaaaaaccaccctcatccgcctcatcacgggactgatgaaaccgcacggcggctccatctccgtgctgaacctagactccgtgaaaaaaagccgggccatccaggcctccataggctatatgccgcagaaattcgggctttacgaggatctcaccgtacaggaaaacatggagctttacgcccgcatgcacggcgtctacggccaggacagggaaaaacgcttccgcagcctgctctccatgaccaatctggaacgcttcaccacgcgcctggcgggcaagctctccggcggcatgaaacagaagctgggcctgtgctgctccctggtctcctccccgcccctcatcctgctggacgagcccaccgtgggcgtggacccgctctcccgccgggaactgtggaacatcctgaagcaattctccggggaggaaggcgtgggagtgctggtcagcacctcctacatggacgaatccgcctactgcaacagaaccctcatcatgtatgaagggcgcctgcttatggacgccccgccccccgacgtcattgcccgggcggaaggcatgtgcgtcacggtgcacacgccggaggggctgcatgcgcgccagttccagagcaggctggccgccgtgcccggcatcatcaacgccaccccgcagggcaacaccgtccgcatcatcgttccccccggccaccctgcgcgggaaaagctggaggaataccaccccaaacccgcgcagccggacttctccgacggcttcatgaccctgctggccgatcaaatggacctcgctccgcaggacatccccgtccccgccggaccgccggaaccggaacaggcggaaaaaggggacaccgtcatccaggtgacggacctggtaagaaaattcggcagcttcattgccgtcaaccacgtcagcttctccgtccgcagggggcaggtcttcggtctgttgggtcccaacggggcgggaaaaagcaccaccttccgcatgctctgcgggctgctgcccgccagcggcggcacgctcaatgtggccggggcggacctgaggaccgccgccgcgcgggcgcgcaggaaagtgggatacgtggcccagaaattctccatgtacggcatgctcaccacgcggcagaacctggaattcttcgccggggcctacggcatggccggaaaggaacggcaggaagccatccgttccatggaagaggaattccacctgaccccgtacatgaacgcccccgccgcgcacctgcccggcggctacaagcagcgcctcagcatggcgtgcgccctcctccactccccggacatcctctttctggacgaacccacttccggcgcggaccccctggcccggcgggacttctggctgcgcatcaacgccctggcggaaaaaggcgtcaccatcatcatcaccacgcacttcctgggagaagcggaattctgcgacaacatgctcatcatgatggacgggaccacgctggcggaaggctccccggacgacatccgcaaacacgcccctccgcgggaggacggcgcccccgcttccctggaagacgccttcctgtccatcacggaggaacacatgaagaaaggaggggaagaagcatgattgcctcccttaaaagaatcggagccctcatcgtcaaggaactccaccaggtggtccgggaccccggcaacgtgggcattgcggtcatcctgccggccgtgctcctgctcctcttcggctacggcatgagcatggacatcaaaaacgtgcgcatcgcgtacctggccgttcccgcctccagccagtccacggagctggaaacgcggctcaccctctccaggtacttccagaccgcgcgcgtcttctccacccgggaggcggaagaaaagctgcgcacccatgaggcggacgccttcatcgccctgcaaagcgacgcgccggacacgctcaacggcggagtcacgaaagtccagatcgtggtcaacggcgtcaacgccaaccaggccaccctcatccgcaactacctccaggccgtcgtggggtcctgggcagcctccctgaacggccaggccgcccccgtgctggacgtgcagacgcgcacccgctttaatgaagccaacgacagccactactacctggtccccggcgtcatcgtcaccatcatgaccatgatcggggcgctgctcacctccctcgtcatggcgcgggaatatgaacggggcacgctggaaagcctcttcgtcacgcccgtgggcagcggggaaatcctgacggccaaggccgccaccaacttcctgctgggcatggtcagcctggccatctccatgatcttcgccgccttcgtctttgacatccccatccgcggctccctcatcctgctgctggcggtctccgccctgttcctgatcgtggccctggggctggggctggtcatctccaccgccaccaaaaaccagttcctggcctgccagttcgccatcatgggcaccttcatgccggcgctcatgctctccggcttcctgtacgacatcctcaacatgccccccgccgtccgggccatcacctacatcatcccggcccgctactacgtcaccctgctccagacactcttcctggccggggacatcccctccgtcatcattccgtgctgcatcacgctgggcgtctttgccgtggtgctcatgggcatcgcccggctgaaagcccccaaatccctcgaataacgccatggacttcctcgtcagaatagcctccctcgtcaaaaaggaactgctggccgtgctcagggacaaaaaaagccggatggccctcatcatcccgcccatcctccagatagccatcttcggctatgccgccaccatgaacgtcacccgcgtgccgtacgccgtgctggacaaggacgggggagaaacggccgcccagtacatcgcggacctggaaggcacgggcatcttccggcggcaggccacggcggccacggaaaaggacatcgaccgcatgatcgacaaccgggaaatcgtcgtggggctcaccatccccccggacttctcccgcaacctccagaccgggcgccccgcctccctccagctcattgcggacggccgcaacacgaacacggcggccatcgccctcagctacggccagcaaatcgcctccgcctacggggcggacctgcttgccaaaagcggcggctcctccccggtggaaatagaatcccgcgcctggttcaaccccaacctcatcacccgctggttcatcgtccccggcctcattgccgtgctcgtgctgatcaactccatcctctccggcgcgctctccatcgcccgcgaacgggaggaaggcaccttcgaccagctcctggtcgccccgtacacccccggagaaatcctgctcggcaaggggattgcctccgtcatcaccggaatcatgcaggccgtcttcgtggtgctggtagccatgttctggttccgcatccccttccagggatccgtctggctgctctccgccgccctcctgctcttcatcgtcacggcggcggccatcgggctgtgcatctcctcctttgcccagtccctccagcaggccattgtgggcaccttcctgctgctggtgcccatggtcatgctctccggctttgccacgcccatctccagcatgccggaaatcttccaggacctcaccctgctcaaccccatgaggtacggcctggagctcatccagcgcatctttctggaaggggccggattcctggacctctggcccctcttcgcggccatcatgactgttacggtggtggccgttctggcagccattttctccttccaccataaaatctcctgacggaaaactttgctttcccggccccggaacattctggcgcccttttgccattagtctttcgcctttaatattttcatcacgccaatcccgtcacccgcataaaaatacttgcatccggcccggtttttctattctatctctctcgttccttgagaacatgggctcgtcgttcaatggataggacatcggtttccggtaccgacgatgtaggttcgattcctaccgggcctaccagatttttcataccgcaagctgctgtttatcagtgcctgcggtttttgtttgattgaaatcgcaagacatcggaacggcgtttgattacccctccgcaccgtctggcggcaacgttccgcctgtgcaggtcattccgcaccacatcctgccggcctcccggaaacatcaaccgcaggacattccccgcccacttaaagggcggtccctttcttcgtcataaaaaggcgggacatgtccgctccctcaagcttcagaagactgattttcgcggcaattccgccggcatagcccgtcaggctcccgcctgcgcccaccacccggtggcacgggatgatgatggaaatggggttatgccccaccgctcctcctactgcctgagcagacatgctccttctattcccgcgcgcggccatcttccgggcaatctctccgtaagtggtaacctctccgtaagggatgtcgcagagaatcttccatacggcctggcggaactctccccccacgggggccagcggcaattcggctaccggaggcctgccgcccgcaaaatacctgtccagccagtctcttgccgcggcaaataccggcaggccgtccctttcctccatgtccccgctgacggtatctccaaaatacttctggccctccagccacaagcccgcgagatgttccccatcgctcgccagcgtgagcggaccaaggggtgacgaatagtatgttgaataatacatcatctttctattgtttcagtgttgtttcagtgaattccataaattgacggcagcatagccgcgccacggcctccagccttccgccagagcaagaatttccttttgcgtgcgcggggcgagcgcctctctaatgccgggatcggttgaaggaaaggcatccgtccacccgagagcccgcatggcgatatactgcgccgtccatgttccgatgccggggagccccgtcagctttttcatctccgcctcaggatcggcccggaaactgaaatcaatgctcccttcttcaaacgcgcgcgccagctcgacaaccgccctgcccctggatgcggtcattccgggaatgtcccatccggcgcttcccgggccgctcagggaaagaatcttccccggcgcaggaaacgcatgggtcagcccctccatccccgtccgcacgggctcgccatggctccgcgccagcctccccgccagagcattcgcggctttcatggaaatttgccgtcccagcgctgtccgcaccgccagctcgtaagggtcaaagcagccgggcaaacgggttcccggaacatacagccccggagacaggccgttcatggaagccagcgtttcatccaccgcggccgggtcacagtacaagtcaaacaaatgccgcacccttgcaagcacctgggacaagactggaagcagagacctcgcgatcaccacgatcagcgcatttttcacggggcaatggcccacccgtatccagccatagacatctttcccccttctggttgcaagacgcacggtgcggccatactccccgccgcgtacggcctccacgccgggaatggcccgcagcgcgaggaactcaagcagcctctcccaccggtagggagggcggtaaggcagcgtcagcgttattccggagccctcctcctcttttccccccttccccagcttccgcaatgccgccggggaaagtctgtattcctttttgaacaattcattgaagcgccgcaaactgccgaaccccgcgctcatggcaacgtcaagaacagaaagcctcgtgcttgtcaggagattcttcgccagcagcagccggagagtctgcaaatactggatgggggaaacattgaactccgcggcaaaagcccggcgcaaatgccgcccggtgcagccaaggtgggcggcaagctcttccaggctttccatgtctccgcaattctcctccaggaaaccggccgcacggcgcgccagggaagcggcggcgtccaccggggcggttccgggcgcaaactccgggcggcattgcaggcaaggccggaatccggcccgttccgcttcagccgctgtggcgtaataggtgcaattcccggccctgggcagctttgcgcggcatatggggcggcagtaaatgcccgtagatgccacccccacgaagaaatggccgtcaaaacgggcatccttggatttaaacgcggcataccaggcctgttcatttcctttcatggttttgcaaactccacggttgaggctcatgatagcaaaccgcggacatgattcccgccattttcggacatgcatccaaaaaaattattttgacattggggaataattatataaccaattacgtaatcagttacatttttaacaatacaacaggagacgggaatatggatttcttcaaccggacaggaaaaatggccattggaagcagactgcggatgctgacggataaaataacgaatgacgccgccctgatcttccgcatgtacggcgtggacatccgccccaaatggtttcccgtgttctttgtcctgtcccggggagaggccaaaaccatcacctccattgccagggaaatagggcattcacacccgtccgtcagcaacattgtcaaggagatgggcgccagggggctggtgaaagaaaagaaggacaaaacggacggacggagaaacctcgtcatgctgtccgccaagggaaagaaaatgtccgatatcatggcggaacaatatcccgacgtggaagctgccgtggaacaaatttccagccaaacccggaacgacctgtggcgcgccattgaagaatgggaaggcctgctggcggaaaaaacgctgctggaacgggtgaaagaagcaaaaaaggaacgggaaggcagggatgtctccatcgttccctacgatccccgctaccgggccgctttcaaggcgctcaatgaagaatggattacggcgcactggcagatggaagaaccggaccatcacgcgctggaccacccgcaggaacacattctggacaagggcggccacatcttcgtggcgctttacagggaagagcctgtcggcgtatgcgccctgtgcaggaagaacgatcccgttcatcagtacgaactggccaaacttgccgtcagccccagcgcgcagggcaaaggcatcggcatgctgctgtgccggaccgtcatcgccaaggcgaaagaactgggctgcaaaaaaatctttctggaaagcaataccctgctccgcccggccatccagctatacaggaaggcgggattcagggaagtggagatttaccgcccgtcctatgaaagggtggatatccagatggaactggcgctccagtaatgcgccgccatcccggcccgttccggaggaagggccactatcctttcctccggccaagaaattcatgcccctcatatcgccgtcaaatggtcatcactcgttttccggtgaagcagcctggtatctggtgaacaaatttcatcaaaagacacgaagatgatacccccggtttgagagctggacatcagggcgccaaaacaatcaaggccataatcgtccctgactgcgggagaatcgatgattttcagaatcacgttatgatcctcgcccccgtccgtggtgatatggtcgcctatttcaatctcctctccggaaaaatacctcttcatcgccgtttcctgatgttcggtttttatcatgaagtcaccatttctccaactggttccgtgcccggcagttttttcttaggagaaaaatccggggcatgccgttccttcatgccatgaacataacaccttcgcctcaaataccccgtgatcaagaaaaaaatgtgggcagccagagcctctgatcttttttaaaaaatctcccttgttccggacgatggcgaaagtcgcactgccatcaagggaaaaggcaaaggcgtccgcgtccttcgccttttccatgccccaacgccaacaaggccgtttcctccgtgcagaggggaaactgcctgctgtttttccctccagcccgttcccttcatttttccgcttccttatcaagcgcagccactccctcttttatcgggttcccggcaaaaaacgaatctccggactaggaagaagagaagttcctttcagcacggcgcgaccggagaaagagatactttccctattagtctgacggcgctccattttcctctggaaattccggtgttcaaccaccttcctccaaaccgtttcattcaaaatcgccgccttttccaaaaacctccctttctttcattttcaagcctttctttaccctgtccaactggacttggcaggcaaatcgcgttatgatgcggccgctcctttcctcatgatttccgctttaaccgggatcatgaagcgcacccatgaaacagagaaaaatcatccatgtggacatggatgccttttacgcatccatcgaacagcgcgaccatcccgagtaccgcggcaagcccatcgccgtaggaagaccggagatgcgcggcgtggtggcggcggccagctatgaggcgcgccgcttcggcgtgcgttccgccatgccttccatgaaggcgatgaagctttgccccaagctgattttcacccgcaaccgcatggacgtgtacaaatccgtttcagcgcagatacgctccatcttccaccgttacacggacctggtggaacccctttccctggatgaagcttttctggacgtcacggaaaacaagccgggcattccgctggccgtcgacattgcacggcgcatcaagagggaaatcaggcaggaacttcacctgacggcttccgctggcgtttcctacaataaattcctggcaaaaatcgcttccgactaccgcaagccggacggcctgttcaccattcatccctcccgcgcggaggaattcatcgcgcggctccccattgaggccttctggggcgtcggccacgccaccgccgaacgcatgcgcgccctctccatcaccaacggggcgcagctccgggaacgcagcctggatttcctgctccgccatttcggcaagataggggggatcttctacaacttcgcccgcggcatggacgaccgccccgtggaaccttcccgcatccgcaaatccgtgggctgtgaagaaacctaccggacagacgtcaccagggcggaggccctggaacaacaccttcccctgctggtggaagagctcacggggcgcctggcgcgctccggcttccggggcaacacgcttaccctgaaggttaaattcccggacttcgtccagaagtcccgctgcatgaccgttccggattccctgacggagaaggaggacatcctgcccctggcccggactttgatggaagacctggattccggggaccgcacgttccgccttctggggctgtccgtctcccacccccaggaagaacagcggcaaggaatctgggagcagctttggctggatttagagtactaatcctcccacagactcccatatttttagtattctccccttaaaatcaaccttatccacaagatattggtgtatgaatgagcgaaatccgctccaacctggtcataggtacgtatgaatcaggaagaacgtagacactgggcatcatggataggaacgattgcggaaggggtggcaggcgtcatggctgtggacggcggaattcccgcctcccagggcgtgcctgatcccggcccatcccgaacgcgccgtcccctcacggaaacggaaaagcgcatcatcgagcaccagggaacggaaccgcccttttccgggcagttcgtcagcttctttgaacaaggcacctatggctgccgcaagtgcggggaagccctgttccggtcggaagacaaattcgacgccggatgcggctggccctgctttgacgattccctgccggacgccgtcagaagcatcaacgcaggccaggggcggcgcacggagatcacatgcgcccggtgcggagcccatctggggcacatcttcaccggagaacgcctgacgccgaaaaacacgcgctactgcgtcaattccctttccctggaattccaggctgcgccgcagccggccatggcgaacagcccccattgacgcgcacggcacggaaaaaaggaccggacggaaaagccgggaaccggataaaagctccgggaaaattctattttccggaagaaacgcgcctctgaaacattcattcccgcgcctgcgtaatgtggtatcatgagaatgaccaccctgcgcatcatcccggtcctgctggcccttttcctggcgcacgccatgggcggggagcccagaatcgccattttgggggacagcatcccctattccggacaatggcctgccctggtggaagcggccctgcggcaggctccggcctaccggcacgcggaaatcgtcagcatggcgctccccagtgaaacggtctccggcctgtcggaaccgggccacgccgggggcgccttcccccgcccgtgccttcatgaccgcctggattccattctctccaaatacgcgcccaccctcgtcattgcctgctatgggatgaacgacggcatgatgcagcccttttccgaatcaggcttccaggcctatcaacaaggcatggaacggctgaaaaaaagagtggaagacaccggggcccaattcatcgccatcacgccgcctccctatatggcggataccccggaaaaggatgcggcccgttacaaccaggtgctggacacttatgccgcatggctcgccagccgtaaaaaggacggctggaaggttgtggacatgcgcccggagctgggccgccaaatccgggaagcgaagaaaaggaatccccgcttcatttacgccggggacggcgtccatcccgggcaggagggccacttcatgattgccagggccatttggcctcccctcgcctccatcctccgcgtgcccgcccgcgtccgttttccggaaggggacgagttcaggaaagccctggagcgccacaacctgtacaagctggcgtggctgacggaaacgggccaccgccgccccggcatcccgaagggggttccggtctccgttcttccctgcatccgggagggagtggccgtctcggaatggcacggcttcccatcccttcacttcaaggtagcgggcaggaacgccaccctcgttctccccaaaaccccggcggaaaacaggccgtggatctggcggcaggaattcttcgggaacgagccgcaggcggacatagccctgctcatggaagggtttcatgtggcttacgtggacgtgcagaacatgtacggcgcgcccgcagccatggacatcatggaccggttttatgaaacattggtccgggactaccgcctttccccaaaaacggtgctggaagggttcagccgcggaggcctcttttccttcaactgggcggccctgcatcccggccgggtggccgccatttatgcggacgcccccgtttgcgacgtggcgagctggcccggcggcagggggaagggaacaggctccccggaagactggctccgcctgctggacgtttacggcgctacggaacaggaagccctgagcggaaagctgagccccgtcaacaggctggcgccgctcgccaacgcgcgcattccggtgctcgccgtggtgggggacgcggacaacgtggtgcccctggaggagaacatggccgtagtggaacggaaataccgcgccatgggcggcagcatccgggtgatccataaaccgggagcaggccaccatccccacagcctgccggacccggctcccattgtggaatttatcctgaaatccgttcgcgggaccggctccgccgcggcggaacagggaacgcccgtatccggaaagcccttgtcccccagcaggaaagccccttccgcattccccgttcgccccgcactggggaacgggggggattagcttgactttcctgtaatgtcgcctattctgactcaagcattatttgcaaccactcacacttattatgaccgaccgcagaattgttatcaccggcatcggagtgatcagccccttgggcaatgatcttgcatccacctgggaagccatgaaggctggccgcagcggcattgacaccatcaagtccatggatgtcaccgactactccacgaaaatcgccggtgaagtcaaggatttcgatcccaccccgtatttcaagacgcccaaggacgcccgccgcgtggaccgcttcacgcactttgccatgggcgccgccggaatggctctcaaggactccggaatggatctggaagcggaggacaaaacccgcataggcgtcatggtgggcagcggcatcggcggcctcggcacgctggaaagccagcacgccacgcttctttccaaagggccggcccgcgtgtcccccttcatgatcccgtacatgatcagcaacatcgcctccggcctcatctccatggaatacggattcggcggcccgaacatgtccatcgtcacggcctgcgccacctccaaccacaacatcggggaagcctggcgcatcatgaaattcggcgatgcggacgtcatggtctgcggcggcgcggaagccaccatcctgcctacgggcgtctccggattcagcaacatgaaagccctcagctcccgcaatgacgaaccccagcgcgcctcccgcccgtatgatgtggaccgcgacggcttcgtcatgggcgaaggatccggcgtcgtcattctggaaacgctggaacatgcccagaaacgcggcgccaagatttacggggaactcgtcggctacggcatctccgcagacgcccaccacctcaccgctccggacccggaaggccgcggcgccgcacgctgcatgcagatggccctggaacacgcaggcatgaagccggaggacattgactacatcaacacgcacggcacctccaccccgctgggggacatctgcgaaatcaaggccatcaaggccgtctttggcgaccacgccaaaaacgggctgctcatcagctccaccaaatccatgaccggccaccttctgggcgccgccggcggcgtggaactggcagcctgcctcatggccatgcaggaaaacatcatcccgcccaccatcaacgtggacaaccaggacccggaatgcgacctggattgcgtgcccaacaaggcccgcggggccaaagtggacgccgtcctgagcaactccttcggtttcggggggcataactcctccgtcatcgtgaagagattcgcctgaccctttcaggaaaccccttcccggcggaagcgctgatgtttgtgtccaccgcagccatcgcgcttccgccttcttcatttcacagccatgccttccaaaacgcaccaggacattctgctcatgcggtgggccctgttctccgtagcggggatcatcctgatcgtggtgctgtattccctgggcgtcacccccgcctgggcgcaagccctgaagggagccatggcctccgctccgtttctgctggctgcagatgctccggccctctcccccggcatgggcttcctgctgtgcattgcgctgacgctggccctggtttacgacctgatcctgatccgcggaacactccgtaaaacagccgttctggccgccttccttctgctgctggcctgctttaccccggtgctggggctgtggggcatcttcttcaacgccgttccgtgcctgctctccgcggggagcgcgggtgcgctcgccatcctgtggccccagccgtcacccggcccgcatcattccgaacctccccccactcatgaataatctggactatccccttcccgtgcttgaactggtaaccgccctcaagcagcttccgggcatcggcacccgcggtgcggaacgcatggccttgtggatgctccaggggcacatgggggaagcggaggcgattgcccgcaccatcggccaggcggcggaacacgtcacgccgtgccccgtctgcggctttttcagcaccgccggagaaccctgcgccgcctgccgggatgaagaacgggacagccgcctcatctgcgtggtggaacaggccacggacgtcattcccattgagcgcagcagcgcctaccgcgggctgtaccattgcctgggcggcaagctctccccgctggacgacgtggagccggaagacctcaatatccagtccctggtggaacgcgtcacccggcagccgggctgtgaagtcattctggcaacggggtccgacgtggagggggaagccacggccacctacctccaccacctgctcaaagaactggactgcaagatttcccgccccgcccagggcctgcccgccggcgccggcctcagccatgcggacacgctgacgctgatgaaagcgctggaaggcaggacggccctttgaaaacgctctaaaaacaaacccggactccctttgaaaacaatcagtcacgcatgtagcaacatcgctgacaaccaattcattaatacacagcagattaaatctcacgggcgtattgtctggattgacatctgccgggtactcaccatgctgtgcattatagcatcccatgccaatgtatggaactatttcagcgataatataataggcgcttggtccgtcttcgttttctttttcatttcagccttgtttattaaacaggacagtaaaaaggcgctcaattacagccgttttctcaaactgttcattccttatcttctctggtgcctgattggagcgttgatctacttcaaattcaatcttcatgccatctatgccaacatggttgccgttttcggctgtaatatcttcaacaccttccccgcctacggaatactgtggttcttgagggaactgctgctgttaagccttgtcagccctctgttaagtaaattgaatgatgcggcactgttgttatttaccgtcattttccaaattctgggggctgcccccgaattaatttaccatgcgggtttagatgacatcccctttttatttaaagcacagggagcgtacggcatgtcctggttcctgcttggtattttttgcgcgcgcaggaagcgcatcatccgtcttcacgcatggatttgcgagcaccttgcccttgtttcattcttgacgctggcaatgctgctgtgcgccgcagttggcaaatacgccatgcaggatgccggaggcagccagcatgccgccctcatattgatatccgtccaaaacatcttcatggtcattttccccatggtatgcgccatagcctgcacccggctatctccgggaacggctactaaactatccagcctggcgccttccgtctttttcgtctatgtcttccaccccataggcattatgctattctatcacagcatacccgccagcattgaaaacagcacgctgcactccatcctgaaattctttgaaccagttcttgtctttgctgtttcagtctttgtattcaacatcctcagacgctttaaaacggtgggaaaatggatatgcctttccacatgaaaatgccataacggctaaaaacagaataaaaatccggagggaggggccccggagcccgcatggcagaatccatcccgcaaataaaatggatctgcacaaacgtacccccgccgtgtgccaaaaagtccacgttcccaaatatgaggaggggaatgaaaacagcttgaaatatgccgttggaacctcaatcccccgtcattccgccaggccgtccacgcgggcgcggtcaaaatccgccgggcaaatcgtcacgttcacccggtcgcccggcttgagcacatctcttaacggagcgttctttttctccacaaaagccacagtagtcttgccgttcggcagggtggcgcggaaagccgtatccgcgatgcgctccgcaataacggccactgcctgcactgtctggtagggataaagtttcatctggaaaaatcaggttacaaattcatcaatccgttcatcaggtcgctcccggtcttgagccccttctccgcggcgtcctgaagctggggcatgacgggagcgggaacctggtctgcggccggaatcctgaaccccccgttacccttttccgtgccatccttccccctgccttccccggcccccttgttcagcaggcgcgacgcgacgtccgccacttccgccaccttgcccatgccgatctccgtcaggcggtctcccgccgccttgataagccgcgcggacaagtcttccgacgggttgtccagcgtgccgccaatgttcacattggcccataccagattgcctccggctccctggcgggaagcggaaaacacgtcggaaaagcccggcagggcgctccacaggccgtcggaccgcaggcccacctgcaaccttccgttaagctcgcctccttttccgatttccagccagccttccaccctcaccagattttcgctctccaccagaatgtcggagacatgccaggcggcttccttatagcggaactgggcggacgccttgtgcagggggagctggcggaatctggaagaaccgcagaagagagccagcctgtccaggacgggaagcccggtcagcatcccgtcctgcaatcttaccagcccggccacatgcgtcacgccgtcccggccgccgcgcaggtccaccccgccgctcacactgccctggacatgcttcttccagtcattctccaggatggaagaggcgggaacgctgttcaccaccatattcgccgtccaggaggaggaaaggccgtcccagtcccccttgatgtccacatagccgccggcatccgtggtcaggcggcaggagggaacgttcacccgcctgctggaatggttgaactgcgccgtgccggacatcagggaaaactccggacagcccttgaagggaaggagcagcctgcccccctgcacgtcaaacttgtactggctggacccggcatcatgggtactctccacacgggttccgttcagggcgtacagcctgccgggaacaccgtaggagacggacagggaatcaatgctccccttttccaggcggaacgtatccggcaggatattcttttccacccagctcctgggtccctcttccttttcccggaaacggaagggcgccggggacagttgaagcttcagctccgcaatattcacggaggtaatcacaaaggcgcgcttcagcaaatcccagcggctgaactccgtttcaatgttttttgcctggagggaggttaagaactcatgcccttccatcgtcacgccgtcgcaccggatgccggaaccgtcccagtccagcggggctatcctggcggcatccacattcatgtcgtcaacggcggactgccccagcatggttaaaaaatcgtcactcttcaaataggacctgacatacaggtaggagccggctaccgccgccacagccagcaccagagcccccagcacgccccacagcaacagctttttccaaatgcctccggcacggggctttttcctgcgtatcctcctcattctggacatggtaacagactatatcaaatccggcggcggtcaagcctccggattggacctccggctgctgcaagccacggataaacggacatccgcgccggttttcccccgcctaccgcgggccgtggtacaccttgtgccttccggacgccatggtgataaagagcaggaacagggtgtaggccgccagaaagcccatcggaataaccgcgccatgctccccgcgtcccagcgcttcaatgggggcggcctgcttcacccagatgttctgggccagccaggtcaggaaaatcgccagcagcagcgtgggcgtcacgaacttcatgatgaagcggtagattctgggaatgcggatgacggaaccgtcttccagatccatcagcccccggtccactcccagcttccaggaaaacagaatcatcatcaccatggcgcttacaaagaaacacagggtgcccaggaagaaatcatacgtatccatcgccagcaggttgccgctgtaccaggcgacgatcagcgtgcccgtggccgtgaaaaaaccctgcaccaccacggccatcttgcgtttcaaccccatgaactcttcaataaaggacaggcccacctgcatcatggaaatggagctggtaaccgccgccacggtcaggagcaggaaaaacaggctgccgaagatcacgctggagcccatcttggcaaaggcctgcggaagcaccatgaaccccagcgcaaaagttccctgcccggcggctccggccacccccaggaacgccacggcggcaggcaccgtcatcatgccggcaatgcccacctcgcacacctcgttggaggcggccgcggaaaggccgctcaatgcgatgtcctccttcttcctgacgtagctcgcataagtcaggatcagccccgtccctacggaaaggctcaggaacacctgcccggccgccgctatccaaagttcaatgtttttcaggccgtcccacaacgtcacctcggtcagcctgcgggttccgccggacatttccacctgccgcacggcttcatccatggccccccggtgggaggcggacaccatggaaaccgtcttccactccccgctgtcccggtcctgctcctccaccagcaccttgctgggattccacatataccccagcccctgctcaatgctgcggtccggataggatgggtccggcgtgccgatgcacaaaatgcgcaccagcagcaccagggaaatcagcaggagtatcggcatgaaccagcgtgaaaacatctcgattcccttgctgatgccccggtaaatgattcccaggttcagcaggatgactccgccgacgatccagagcagcccgttgttagacagcagggcgctcccgtccccgtacatccccgtgaaactgaaaaaggtctgcgccgttccctcagccgtggcaaatacctccggctgggtcagcatcttccagaaatagccgcagcaccacgcctccaccaccatatagtaaaaggccacggaggaagggcccagaaccgcgagcacccccaggaacttccacagcctggaccccttggtcaggtaccagaatacgccgggggcgcagtgggctcccatctggccgccgcgccgcccgatggaccactccgcccatgccacgggcacgcccaccagcaccagcatgagaccgtacgccaccatgaaggcgcccccgccgtactgggccgccagccccggaaaacgcagaaagttgcccagccccacggcgcttccggccacagcaagaatcacgccaattttgccggaccactcgtcttgttgcgcctttgaggatgacatgcaggcaatactgacaaaaaaagcttcattttcaagagaaaacaggtccttttgccacagagaaggcatcattgccacttgactttcgttcgttttttggaatcattcttttagaaccaaaccaaaaaaccgaccatgctcctcataggaaaaccggcacctcatttcagtgcaaacgcagttgtaaacggtaccatcgtaccggatttcagtcttgaccagttcaagggcaaaaagtacgtgatcctgttcttctacccgaaggacttcacgtttgtgtgccccactgaattgatcggcttccaggaagccctgggcgatctcgacaagcgtgacgtagccgtcgtaggctgctccacggacagcgaattctcccactgggcctgggtgaacaccccccgtgaccagggcggcatccagggcgtgagctaccccatcgtttccgacatcaacaagaccatttccgccgactacggcgttctggccggagacgaggaaattgacgaagacggcaacgtggaagtcaacggggaactgatcgcctaccgcggcctcttcctgatcgacaaggacggcatcgtccgccaccagctcatcaacgacttcccgctgggacgctccattgatgaagccatccgcgtggtagacgccctccagcactttgagctgtacggagaagtctgcccccttggctggcacaagggtgaagcggccatgaccccgtcccacgaaggcgtggcctcctacctcagcaagtaagctgccccggcaatatttcaaggccgttcccttttccggggaacggcctttttgccgcttttctctaacatataagtattgacaacggacccttccgttctaatttacccggaatgaactacttcatgccggctttcctgttgatttctgcccttgcaggctccgtctgggccgcaaatgcccaagcgcctgaaaacatcagggaccttgaaacagcctatcaaaaattctgcaccaggcgcggggaagctcttcttcccgcattttcaaaaaaacttctcgccctccagcagcaggcggtcaatcaatccgactttgaaaaagccaaacagattcaatccgttcttcaaaacatcaaaaaagatattctctctccgccttcttccaacaccatcgacccgttcttcataggaaaggcgtggaaaaagaacggggacagcaacgaattcacgcagtttctggatgccggactgaggcggttctcaaaagacattaaacaaacagcattccagccccaggaccagtgggcggaccccggaaaatcctcccgggaaatagtggtcttcaccggggagcccctgcgcatctgggttaaaaaagacgactccaccatcattcagatttacaaggactccagtactgactggctcaccctgcaagacggcaggcaaaacatcatcaaatcaccggagccgggattgaacaacctgcaccaggaattcctgacggaatactccaaggcgtgccagccgttaacccggaaatatctggccgccgtggaaaaaaggcagaagcagctggcccagcagggaagcatggaggaagcgatcgccatccacaattacatgaagccattcaattccgagggcagaccggtggaccagctgttaaacggaatctggaagaaccaggcgggagaactgtatgacttttccaataaatcaaaagcggccaagaaaggcccggacggttccctgaaattttatctggtttatacgtccgccagtcctacaggggaatggaaaatggctcgtgtagaccgggggacggaaaagggcatggaagtcattttcttttccgccggaggaaaagtgtacctcattccgaacaggccctcccgctttttctctatcttgacgcgcgtatccggtacctgacggccctttaaggcgcacattcccggctatccccccttccccggccgcggcctctccctttccggaaatgccggaactgtcataaatcaggaggaatacgcgcacgccccttgagccgcacaggggtgtttgctacatccttggcatgaatatgaatttcatggcagccgcatcctccagggaagatatctggacaagaaccatggattttctgaacatgccggactggctcaagctggagatggtgcagtccgtgggcgccaaaatcctgcatgtggtgatatggctggtagtcagctggattctcctgaagctgctctgccaggtgctccggaaaatcaccgccctgaaaatgtctccccaggcgtcccgcctgaccgttaaaatagtcaaggaggcaggctacatcatcatcggcgtggaagccttcgccctgatggggttcgacatcctcaccctgctgggcgcggccagcatcatcggcgtggcggtcggcttcgcctcccagacttccctgtccaacatcatcagcggcctcttcctggtgggggaaaagcaaatcaacctgggggacatgattgaagtgggcggcatcaccggcaatgtggactccatcaacctcatgtccgtccagctccggctgccgaacaacaccatggtccgcatacccaatgaaatgatcatcaaaaacccggtgagcaacatcacccgcttttccacgcgccgctgtgacctggacctgggcgtggactacaattgcgacattgaacacgtcgtgagcatattgcaggaagtggtcaaacagaacaagctctgcctggacgacccggctcccgtcatcatgttcaccggattccaggattcctccctgggattcaaaatcggcgcctggtgcctgaaggacaactttctggactgccagaaaacgcttgcccacgacatcaagcaccgctttgcagcagagggcatttccttccccttccccacccgcagtctggagagcagaagccccatccaggtggaaatctccggcacggcggagaaaaatcagtaggtgctctctttttgctttctttttgccccgtgaaatttcaatcttgtctgcgtaaaatccgcatctatgtctgacacatccgcacccgcctatcaaagaatcctcctgaaactcagcggagaagccctgcgcagccccggcagcatggacaacatttccccggaaatcgtcgcccgcattgctgaagaaatcgcccaggcgcaccgcgccggcgtgcagatcggcctggtcgtgggcggcggcaacttctggcgcggggctaaagccagcgtgcgcggcatggaccgcgccacggcggactacgtaggcatgctcgccacggtgatgaacgccctggctctccaaagcgcgctggaacgcgcgggagtcccctgcgtggtgcagtccgccattgaaatgaaaaacgtggcggaatccttcatccgcctgaaagcccgcacctacctggacaacaataaaatcgtcatcttcgccgccggcaccggcaatccgttcttttccacagacactacggcggccctgcgcgccagcgagatcaatgcggaagtggtcatgaaggccacctccgtggacggcgtttatgatgcggaccccaagaaggtttccgacgccaagcgctttgacgccatttcctaccaggaatgcctggaacgccagctcaaggtgatggactccacggccttcaccctgtgcatggacaacaagaagcccatcatcgtattcgacatgcacacgccgggcaacatcacgcgcgccctgctcggggaacccatcggcaccaccatcagctgaactccgcacgcccctttttccaacctacaaaaaacacttagcacccaccacaatcatggacgcagaaacattaatattggaaacggaggaatccatgctcaaggccgtggacttcgccaaacaggaattctccggcgtgcgcacgggaaaagcctcccccggcctcgttgaaaacctggacgtgcacgtctccagctacggctccgtcatgaagctgaagggcctggccgtcatcagcacgccggaaccccgcctcatcctcatccagccctttgacccgagcaccgtccatgacatcggccgcgctatcaatgaaagcaagttgaacctcaacccgctggtggaaggccgctccatccgcctgcccattcccgccctcacggaagaacgccgcaaggacctcgtgaagcttgtcaaatcccaggcggaagaagcccgcgtgcgcgtacgcggcgcccgcaaggccggcatggactccgccaaaaagctcaaggcggacaacatcgtcacggaagacggccagcgcgatctggaaacgcagatccagaagctcacggacaagtacgtgaaggacattgacgagctggtggccgtcaaggaaaaggacatcatgaccatctgagccagaaccatccatccccaaccattttacgacaatgacagacaacgtaacaaacttcctcgcctccggcattgaaatcaagggaaccatccgtttccagaacgacatgcacatcgacggcaaaatcgaaggtgaaatcatttccgacaaaggaaaagtcaccatcggagaaaccgcccagatcaagggcgacatcaccgccggagacgtgcgcatctacggcaacgtagaaggcaaggtcacctccgaccgctgcgaactcaagcagcaggcccgcgtcgtcggggacatgaagacccgcagcctcgccatggaagaaggcgcccacctgctgggccgcacggaaatcggttaaaaccgcgaacctcattttttcatcaagccgttccgtcctgcgcgagggaacggcttttttacgcccggtggcagggcaacccggcagaaaaagaggaatactccgcttgaaaaaccggtaaagacggaaaactcccatccgggagcggaaggctcccgcctttcgcatttacgtccgtccgaagcaaagcagggctttcttccctttctcccgcagccgcacttgatgagggccaggaggccctcattcccgggcggaacgccgattcccacttttgcggcaggcaggccaggcccccggtggaacctggccgccaacagggcaaaaaacgggaggtggagcaaaagccgctccgttatcccgcttcctcaggaaagtcaggaaaggggcggacgcacgatggaccaggaacgcggctgcgcggggtccagcaccttcttgataaaagcgttcacctggtccagctccatgttcctgatggcgactgtctgccgttcaaacgcatccaggggcagcccgaacaggatatccagagccagcatctggcacagggctccgttggactgcatggccagcaggcgggaggaaagggcggacgccttggtgcgttccagctcctcttccgtcatgccgcgctcatgaatcatctccagagtcttttccagccgctgcccggcttcctccagttgttccggagaggtgcccaggtagaagcagatgcctccggcgtccatgccgatgaacagggaggagctggcatagtaggccagcccggcttcctcccggatgttggtgaaaacgggaccggccatgtcactgcaccaggcctggaacagcagcgcctgcgccatttccggggaagccacgtccacgcacggcattcccaccaccagcacggcttgctgcttgtccagcacggacacctcccggccagcgcgcagcgcgggcgtgggagtcaggaccggcggcattccggccctcattccgccaaggcgcttttccagaagagggagaacctcctccttcctgacatctccggaaatgcatatcacggcattggaggcgcagatgatgcgttcatactgttccttcacgtcccgcaccgtcagtgaagaaaggctctccggcgtgccggacggggaattcccgtaggaaacatggccgtaggccaccttccgttcctgccggaacgccacggaaagcggatcttccaaatcctcctccgcatccgccacaaaggactccttctcccggaggaaggcgtcctccgggaaggagggattcatcaccacatccgccatcagctccagtccggaatccaggtcttccgccagaatctggcagcccacgctcagggaattgttgcctgtggaggtattgatggcccctccgatgtcctccagaaaacgcgctatgtcccctgcggaacgcgtggcggtccctttcagcaggcattcggacatcaaatccgtcaccccggcgtcatgttcattctccgcacggcagccggccttgaaggccaggcaggcataggccagcggaaggcggtggtcctcacgaatcaccaccttcatgccgttgccaagcacatgctcgctcagggccgtttccgtcccggcggcggaaccgtcttcctccgcggcgttgctgcccacgggatccaggctgacttccgtcacattcggggaggacagccaggtggagcacacgcggtgcaggtcttccgtagtcacccgttcaatggcttcctgccattctgaagacaggttcaaattgcgcgccccgaaccagtccgcccccatttccgaggccactccagcggcggaactcctgcggcgcaggcggctgacccgcgtctgcttgcaaactctcttcaaatcctccgtaaaatcctcctgtgccagattccgcagttcctggagcaccaggtcccgcaccttgtcacgctgggcgcggtccacgtcaatgctgatggtgaacgccccttcgtcagtctcggactggttggaatgcacctcaatgctgtacaccagccccaggcggtcgtggaacttttcataaaaacgcgcggaacggcccccgcccaggatgctggccagggcggaaagggccggcgtatccggatggcctgaacagggcaggcgccaggcaaggttcagtttggaataaggcacggcaaattccttgcgcaccctgcgggaaccgaactggtgcggttcatggggaataagctcccggttcagggggcgggactttaaatcttccaccagcagttccagatgggaaaaaatctctgcggcatccacatcccccgcgatggaaagcaccacattgttcggaacatagcggctggcatggtaatccagcacgtcctggcgcgtcaggcagtcaaacgcggcgggttcccccagcacgggccagcggcgcggatgcttgagatacaatgtctgcatcagaagctggtaagccacagaatcgggatcgtccgcgtacatggccatctcccggcgcaccacccccttctcccgctccagttcatcctccgggaacgtggggaaaaacaccagctccgtcagaaggttcaggaaaatctgccaggaatccgcagggccgtctatataatacacggtgcggttcacgctggtataggcattccagtggccgccgcgttcctggaccttgcgggccaggtcctgcccggaataatgctccgttcccttgaacaccaggtgttccagcaaatgggaaaggccgctcccctgccagtggccctcattcatggacccggtgcccacccagtactgaagggacactacgggatgggacttgtcctccttgatcaaaaccgtcaaaccgtttccgaaacggcgcgtcacaggctccttggctgaactcatgtttcttagcgtgccttaagacggcaggccatgcaagccgccgctccgtccacgccgcggcactgtcagacttaccccggttttaaaaaacgcagttgaatcgaaaacctccctaaaaaaaacatgctgactgcacatttttttgaacaaatcttaaactctgttactctatcagtcgtagaacggcagattatgtgccgtttatcatcaacaacaccaacctcacacatcatcatatgaaaaagatcctcgctgtagcagcctttgctttcgcattcagtgtcaacggttacgcccaggaagccgccgctccggccgattcctccgcccccgctgctcagaagtgctgcaagaaagacaaaaagtgcgacaagaaatgcgacaaggaaggcaagtgcggcaaaaaatgcgacaagccctgcagcaaaggtgaaaagccctgcgactgctccaaaaaggaagaagctcccaaggcctaacctcacggaaaccatcacaatgaacgcgaacccttgccgaaccctttcggcaagggttttctccaccgggtgggcgtaaaaccgtccgtcccgttgaccatgaaattacttgatttgaaccttcaacccattttataaattgtcatcatgaaaacgacttccattcttaccatcggctgtgcggccatcgcgctgtccatcacctcctgcaccaacttcggttccccgaacgcctacaacctgaacgaaatcggcggcgcacaggaaacctataccggtacggtcaccagtgtggaaaacgtcaaaatccaggccaataacgccaataccggcaccggcatcggtgcagtggcgggcggcctgaccggcgccatgttcggcggcggcaacgccaagtacgccacggcagcgggcggcgccattctgggcggcatcgccggcaaccagattgacaaggccgtgaacaacacgaccggggaacgcatcaccgtgcgcctggaccagaaaaggaacggcacccgcaactacacggtcgtgcaggtcgccagcaggaacaacccgatccaggtcggacagcgcgtgcgcgtgatcatcggcaacaacggttcccgcgtgctggcctactaattggccctccttcactgaccagctacataccggcatgatcttcggcaccttacccggcggcgctccagtagaactgtttgaactgtcttccgacaagctgacggtacgcatcagcaactacggggggcgcatcatctccgtcgtcaaggacggcatggacatgatcgtagggcccaagcactttgaagacatgctgaaagacacctgttattgcggtgcgatttgcggccgtgtcgcgaatcgcatcgcaaaaggcaggttctccattgacggagactcccattccgtggccgtcaacaacggccccaaccacctgcacggaggcgtgcagggcttcgacagcaaaatctggcaggtgcaggaagccacgcgcaacacgctggtgcttaccctgcactccgcagacggggaggaaaactatcccggcaatctggaagtggtagccacctataccgtggtggaagaaaccctccacctccggctggaagcgtacgcggacgcggccaccatcgtcaacctcaccaaccacgcctactggaacctttccggcaagcccaccattgactccatgacgctggaggtgcgggcttccgcctacaccccggtggacgccaccaacattccggacggccgcatccttcccgtggaaggaacggactttgacctgcggaaggcagccctgctgggagaacgcaactccgccgcccatccggacaccgccgccggactggaccacaactacgtgctggattccgaacccggcgacaaaatcgccgccatccttctggacccggaatcccgccaccgcctgatcgtggcgacggacgcgcccggcctccaggtgtataccggggaatacctgccccaggcgcgccagggaatcgcgctggaagcccagggcttccccaatgccgtcaacacgccccacttccctagcgtcatcctgcgtcccggccagtcagccacgcgcaatatcacctggaccgtcaggtaaaaggcatatccgcagtcccctgcgcgggaaagccaggaaatgttccggcgcgccaaactccgaaaccccgtctttcaacttttcaggcgtgcgctgtcaagacgccgcataaagggcttccgccaccaccttttgcaggccttccgccatgcgttccatggaacggcccacaaaaatcaggtccgccacggaaatcagattgtcctgatactgttccggcaggcgcatgaacgtatccgtcatggccgccgcatgctccgccagcgtctccagcgcgggaaccagctccgccagggccttcccgtcccaggaagagacggccttgttcaccgctctgaactgctccgccatctcccggtaaacggggtccgcctgggcggcctcccggatgcgggggcgcttgttaagcttgttggccctcttggcgatcgtcacggcctcatccccgatccgttcatacatggaagacatgcgtatggaagccagcaccaccttgagatcggaggctacgggactgaaaaaagccagcagatgcaggccttcccggtccaccgtcatttccagctcgtccagctcctcatcatccgcaatggcctggttggaggcggattcattctgctgcagcagcccggcggcagccaggtcaagggcgctctgcgccttgtaggccatctggagcaaatgcgtattcagggaggaaagggcggcgtcaaactccctcagggtgtgcgcgtcgtgattcatgattaggaatattggcttgaggactggcggcgcttttgccggcatggtaaaaaatgtgctggcggcgcaggctgttccttttggcggaggatgcggccagcctccgtacaacgccggaggaaagggaaaaatgcccggctccctttctggaagtaaactttgaaaaaaacataaacaactctctgttaactgaatcttcccgtgatataatcctccgtttctttcatggaaggattggaaaaaatcttctccgtggaatcaaactccaccagtcttcccagcatgaaaaaaccggtcaggtcggaaacgcgggtggcctgctgcatgttgtgggtaaccacgatgatggtgaactcctccttgagccggtgcatcagctcttccacccgcaccgtggcaatggggtccagggcggaacaaggttcgtccatcagcaggatgcgaggcttcacggcaatggaacgggcgatgcacaggcgctgctgctgtcccccggaaaggccgttggcggaagcatgcaggcggtccttcacttcatcccataaggcggcatgcctcaggctttcctccaccgcttcatccagaatgccgcggttccttacccccgccagcttcaacccgtaggaaacgttctcataaatggtcatcgggaagggattggacttctggaaaaccatccccacctcccggcgcaaatggatggggtccagggccggggaagtcacgtccaccccgtcaatgcggatggagccgcccgtgacgcgggcctccggaatgcggtcattcatccggttgatgcagcgcagcagcgtggactttccacatccggaagggccgatgaacgccgtcacccggtttctgggaaccttcatggtgacatggaacagggattgcttgctcccataacaaaaatccagggaatccacctctacggcggtctgatcggcggcggctggatgcggagtcatgttcggtcaaatggcgcgtcctgcgccgttgaccgcatggtatcccaaaaacgaagctccgggtctactacgggtttgtgacaatttcttaacctggctttttgagaaaaagaaaatcacgcagcggatttagaatccgtcaagagactggaagaaaccagggagatgtcatggtacacctctcccaagtctttcagccggccgtttttactgttagccagtatcgtatcaagggagatgagttttctgactgtggacatgtcgtttccggaactcgatgccatcatggaagaaaggttgaggggctccaaatcgggaccgggcgtgtcccacgtggagcgcatcaccgtcagggcatccgtgctttcttccgaggcatgcggcatcaggttgatgcgcgccttctggttttctcccgttacccaccacgcaatgtatttacgcacgctggaatttcttttaaggccaatggttttggaggaatcgtccacgcgcaccatgcgggcgtagatttcctttttgtcctggttcttggcgcctacgggcgttcccaccgtgccatggtccaccaaggcgacactgcggaaattttggttggtaagggaacgtttgcccagcaggcttttgcccgcttccagcgtgctgagtctgcgcaggtccgggtcggaaatgagccagcggcggaacatggactttcttcccgtatcgtaggtggaagaaatgttcatgccctgggagttagtcttgttgagccaggtatcccagctgttccagacgcccaggatgtacggggcgttgccttcgctggcgccggaggaaaggatgcccgagttggcggaaacgcgctggtcgggccccagctcacactggagctgcccgagggccacttcgagggaaaacctggcgagggatttggcctccgcggcaaagagctgtttttcggaaatgcggacctgtgaggatgcaatggtaagaaggccaacgctgaggagggccaggagcatcatcagggtgatggtggcaatcagggcaaaacccttgcttatatgtttaaatctttgggtttgcggaattgttcttttcatcgtaattttcctgaaaattattaaaatctattataaaaactgggagacgcaaagctgctgccaataggttttccggcacgtcatatcaacatacaaaatagttctttccgggcaagaaaaatagttctcgttttgcaagtaaaaacgtatctctaaaaagaaaagaccaaacgtgtttttgcattcacactcatttagttttatagtcaattaaaagtaaacggattctaaattcggtggattgaaaaaagacctgaacatcatgttttcacaggaaaaactgcctgaagatttccgtggagacacctctgatatcggcctccgcccgtacacgtcagaggacggcagcccaaccgagcagaaccgcccgatcggttcctggaaccagctctacctgtgggccaacgtgtgggactcctccacgaagagggaaggccaggacacttccgccgccctgcaatgggacggccgctcccccagcacattgattgcggctgatgccgccgcaaacatggaaatgatggacaaccgctacacgtacatgcgccatcccatcctgctgcgcttctactccttcgtagggattcagtacgtcaaacgcgaggcccagcacggagcccgcggaggccatattgacgtgcgcgtttccgtgatcccggtgtatgtctggtggaacccgtacaacgtggacatgaaatcccagggagcggaaggcggtccctggggctctttcttcggagagcaccgctacatgccgctcatgcagaccaataattatggccgcatgcaaggcaatctgatcgaaaactgggatccctctacggccacctattcagaatcacccttttccccgtattcccccaacgacggctataacaaccgccagattgccgactttggagcctccttccggaaaacgtcgcaattaacctcgggaggggtaggaaaagccggggaaccttccacgctcaaagcgggcgaaatcgtcattttcgcccatcccgtcgtcgaacggatcgaacacggcaacatggtcacgcaatccaaggcaaacaagaacgatgtgcgcgtggacaactttgctttcaaggaaggctgggaccagagccccggacaggtcagttcctatgctatcaaccaggctgacggcattcagtaccagtatctttccggcagcggttatgaagacaggggaacggccatgatgtccatcaaatttgcggaaacgctggacgatctcaattacacgcctaacagcgttgttctctgcaccaagtatacagacgaattttcctccagttccaacaaactcggttccatcgtcatggtttccggcatcatggatcccaagcaaattggcaaagcagggaatttaaccgcaaacaccggagcagacatgaatgttttctccaaagccatgccctctattctgaacctgaactggggcgcgtgggaaaaacccctgcttgaccaggtcaaactgcctgcggacatgttcctggacaatgaaggaccggacgacaacctgaaacgccgcggcaaatacggcagtgcggcccaggattccaccttcgtggcctactacggggtatcggtaaaatggggcaagcctccggtgatcggagcctacccggaaggcaaggactaccgcgccaagacatggcagcactccagccctctcttctggggtgggcagatgcccaccgcctccgagctcggacgcctctacagtccctaccagtttgaagtcaaaaacgccaacagcgacttcttccccatcaccatctccaacatcctctccaacgacggcaccaggctctcccccttcggcgggccgggcgccgagcaggtcaacaagatcgtggccgcggaactccccttccagcagccctccagcctcgccggcttcgcaggctgccgcctcaccccgggatggtacaggagcgactccaaggcggccatcgccaagcgcttcgcctaccagtccggcgtgccgggcgtggggatcggcaacgcttttgccgaccccatgctcccgcccgacaaggtcttctcccacaatgaaatcatgggagacgcctccctgggcgacttctgggaccacggcctgatggtcaacgacgccctctgggactcctggttcacctcctccctggcttcgcgcccctccagcatcggaggcacgggcagggaggaacttaaaaccgtgcttcaacaggccttctccacggacgcctcctccaacaaggccgccggcattgccaacaggcgcttcgtgcccgacctccagggcaagccctccgaggccgtcgtcgaagaactctccaagaccgacgaaggctacaagcacgcctccaagtacctcaccgtggccgggggcttcaacgtcaactccacctcccagcgcgcctgggaagccaccctgcttgggctcaaaaagcgcaagctcctctactcccggagcgggactccctccgtgctcaacaacagccagacggccttctcccgcttcggggtggccagcagcgacaagtcccacgtggacgactacggctcggtgggcgtaacccagggcatcccggacggggaggccatggcgtggtccgacctcagaacgctcagcgactcgcagatcaagtccctggcccggaacatggtccaggaggtcaagaagaggggtcccttcctgaacatgtccgacttcgtcaaccgccgcctgcagagcggggagatgggggtgaagggggcgcttcaggcggccatcgacgaaagctccatcaacagcacctttgacgaactctccgacatggtcatcacgcccaagggagggtacccgaaccaggacgcggccaagggatcggtgtacacggcggctcccggctacctgatccagtccgacgtgctggcggtgctgggcaatattttaacgacgcgcgacgacacgtttacgatccgggcctacggggagctgaccaaccgcgagggtgtggtgctgtcgcgggcgtggtgcgaggcggtggtgcagagggggatcaattacgtggacccggtggacagcccggagacgccggtcaagaagatcaacatgaagagcggagcgctggaggagacggagctgagcgcggtgaacaaggcattcgggaggaagttcaacatcgtctccttccgctggctgtctcccgaggaggtgtaataaaagagagagagagtttttttcttcttcccggccagcgccgcttcccatccacggggagcggctctttttgtgctccagggaggaatagggaagagggagggaagggattgtttttacggcggggttctttgaaagaagtcacctaaacctatattgccaagagaaagggactttgctctaggggagtttagttattatatagaaaagaattgaaacatactatcacaaagttgcttatccaaaaatattaatatggaaaaaaccgtcaatgcatgtaattcacaaaaattttctcaaataaatatcaaattttatcttgcctagcagataatttattgtataaaagcacgatatgatcaacttgaaacaaaataccaagacgatagaaacagactttttaaatgtcaaaggaaacttaataagttggcaggatactatcatccagatcagcaatattaccctgatttcaacatctatcgacaagcagccatttccttggttgagcatcgttttccttctcggaagctttgctttcatgaatgtaagttccgtcgtagggtacggtttactcataattgccatcgctatgattgcactttggtacaaaaaatctcaaaaattgaaatctcagaaaaaattgaactttatgttgaattcaggaggaattttcacattagtatttcatgacaaaaaatttctagatgaagttttagaagtcttaacagaaattctcacaacttcttcaagaaaagagtattatactatcaatatcaaaaataatacgattcaacaaaactgcaataacaaaattgaaaatgctacagtaagtgatggttcatctcttcttaacgcatctttagattcttaacaaatgaatattaccatggaatccataaataaaagtaattgcaacaatgttatcaaaggggtttgtgttagcaatggttcatcatttatgaatgtaacgacaaaccaacacgtggacaataattctgtaaacgattttgctgatgaattggcacaaattagaggaattcttcctactcacgaagatatagaccggcttcatcacgctatgactgaactggaattggcactacgtaagaatgataccaaaacctttagagaaggagtcacgaaatatatgaaagttttgtctattccaatctttgtacgaatagctactccacctttggtaaatgcgattagagctatatttccaaatatctattgatgtagtatagatgcaataatctccgccgtgcaaaataacttctttttagtgatgaaggagttattttgcacggttttatatactctgtatccacgtgcagaaattgaaaaaatttataggtatttctcataataaattttaatatatattaaattctatctttttcataaatatcgatttaaaaatcgaatatatctttaataaatattgaaaatcaaaataaaattatctgttttaaccatataatggtaattttattctaccgttgctgcgacacaaaaggggtttctggacattatttttattgatttcttggaaaaattttataatgaaatcgtttaaatgttcgatggatagaaggattatttaaagattattttatctaaaattctctgaccaatacttttcaaatttatcgagaaaacaatccctatttttcaatttcacagctaattgaaaaatagggtattatgttattgaatttgaaaacttcgaaaaactatttcttgatttcattgtctcaggattttgctccaatcccatgaagcttcgacattaacttttctcctggaattgattacagtttgtgacgatttcttaaccaggtttctcttcctcaccatgggggcgggagggtatcacttccccgtcttccggcatgaacggcgccacagtccgggaagcggaagacgcaacacaacagaaaagacgccatgaaatttgtcgccaaaatcctgaccatcgcagccgctctcagctccctgagcatggccgccgagaaagtaaccgttgacagcagcatcaagccgtatgcgcccaccagcggcgtttccggcaacctgagcgccgtcggttccgatacgctgaacaacctgatgaccctttgggcggaaggattcagcaagaagtaccccagcgtcaaaataggcgttgaaggcaaagggtcttccacggctccccccgccctcacggcaggcacggcccagctcgcccccatgagccgccagatgaagcgggaggaaatcgcggcctttgaagccaaatacggctacaagccgacggaaatcaaggtggccctggacgccgtggccttcttcgtcaacaagaacaatcccatccaggccctttccctgtcgcagattgactccatcttctcctccaccttcaagcgcgggggctccaacatctccgactggggagatgcgggcgtcccctccatgaagggaaaagccatctccatctatggccgtaacagcgcctccggcacgaacggcttcgtgaaggaaatcgccctgaagaagggggactacaaaaactccgtgaaggaacagcccggttcctccgccgtcgtgcagggcatcagctctgacgaacaggggatcggctattccggcatcggatacgtcacctccggcgtgaaaaccctctccctggcggaaaaaggcggccaggtggccgtgcagccctcttacgacaactgcatcagcggcaaatacccgctctcccgctacctgctgatttacgtcaacaagaagcccggcgaacccctggacaccctgaccagggaattcatcaagttcatcgtttccaaggacggccaggaaatcgtgaccaaggacggctattacccgattcccgccaaggtcagcgcggatgtcctcaagagcattgaataaacaccccttccatacgccatcaacacatgccggggcaggattgcggccttcccgccggagtcctgcccccaactcccctctccaccgcctgccgtcatgagcgccaaatccccctctcccgcgccgcccaagaagcccaagcccgttccggaacgcttccaggtggcaaaaaccacgctgtggtttgaccgcatcatgactaaaaccatcatcggcgggggctttaccgtcattgtagccgttttcggcatcctctttttcctgctggccgtcaccattcccctcttccagggcgcggacgtggaagaacggcagcacctttccccatccgccccggtccagggaacctggggcctggacccttccggcacgctcccctttgtctatgacaacggcaaaaacgtcttctttctggacaaggcaaccgggaacctgaatcccgctcccgtatccctgccggacggggaaaccgtctgcgcccattcctatgattcatccctggcggcctacgccatcgccacggaatccggcaaggcgggccttatctccgtccattccgggctcaacatccacggccaggcgaacgcccatggcccggacaaggccggaacggaaaccagcccgctctaccccttgacggaaagcggctccgttcccggcagaatatcccgcatagcctacgcggacgcgggggaacggaaaatcttcaccgccaccgtggagacggaacagggtccgcgcctcctgctgatgacgctggaggaatcccgatccctgctccatgaaggggagctggccccctccggcttccatgacctgacggaccagcttgaagggcgccccgccgccctgctgcccggagcctccggagacagcctcgtcatcgctacggacacggacaaactcctttacttctcctatgatgaagacagggaaacgtggatcaagcgccaaaccattccgtcccccctgggaagcggagaaaaaatgacctccgtcaactggctcttcggagacatgtccctggtgataggcggcgacaagggaagccttaaaattttcagcctgtatccccacccccgcccggacggccccgccgtgcgcctcttcgggcagaccaggcagttcccccccctggacggcccggtgcagcattacgcctcctccggcatcaaccgttccttcctggtctccaccccgcgtgagctcaggctctgctacggaaccacggctgacgtccgctggagcagcgacccgctggaattcacccccgtccagctggcggccagcacggaattcaactccgccattgccgtggacgccgggggaaaggtccacttcttctccatggaagacaggcacccggaagcagggtccaaagccctggccgggaaaatctggtatgaagggtatgactcccccaaatggctctggcaatccgtgggcggcacggacgactatgaatccaagctctccctgatgcccctggtcttcggcacgctgaaaggcaccctgtacgccctcgtcttcgccgttccggtagcggtcatggccgccatttacacggcccacttcatggccccctccgtcaagcgggtggtaaaacccgtcatggaaatcatggcgtccctgccctccgtggtgctgggcttcttcggcgcgctctacctggcccccagaatggaggacaaggtgcccgccctgctctgcatggccgtcctcattcccggcctggcggccctgatcgcgtggttctggaccacgcggcccgcggcctggcgcaacaaattcagccgcggcgtggaatacatcgtcatgactcccgtcatcctgctctgcgcctggttctgctgggaatacctgggctactggctggaacagcccctcatcagcctctgccgcggcgtcatgggactgtggggcgcgggggacttccaggccgccagcttcgcggacctgtggcgcaacggcttcggcatgccctatgaacagcgcaactccctggtggtggggttcatcatgggctttgccgtcatccccgtcatcttcaccatttccgaggatgccctgagcaacgtccccccttcccttatcgccgcctcggaggcgctgggggccagccgctggcagatggtccgcaccgtggtccttccggtggcttccgcgggcatcttctccgccctgatgataggtctgggcagagccgtgggggaaaccatgatcgtgctgatggccacggggaacacccctatcatggactggaacatcttcaacggcatgcgcaccctctccgccaacatcgccacggaactgccggaggcggcgcaggactccacccactaccgcgtcctcttcctgggcggcctcattctcttctccatgacgttcatcctgaacactctggcggaaatcgtgcgccagcggctccgcaaacgcttcaacgtcgtttgagacttcccctccctcttccaatccatcttccatgaaacaggacttcagccttccgcccgctcccaaacgccccctgggggaagtcaacatctggctcacctccatcgggctctccctgggcctcatcatgatcttcggcctgctgggcatcatcgtcttcaacggcctggaggctttctggcccaaaaccgtccatgaactgacgatcgcccccgcttcacagggggaaaaaccccttgtcctgtacgccggcatcacgaaggaccagacgcgccacatgcccgcggaccccgccctccccggctccatggcgaaggacgtgcgggaataccagctcttcaccggaagcaaggaagcctacgggcaatcctaccgctacgtggacgcgcacaacgtcaccgcctcctccaccccaaaagggctcctgtgcctggaacgcatggagggaggaaaagccctggtcaaaccgctggagctcaagctggcctccggagaaaccgtcccggcctcctccccggaattcatgacggccttccgccgcgcgctggaccgggaagcggagttgcgggacgacatcaaggctattgacgccaaagacatcggcgccgtcaacacacggctggcggacgccaagctggacatcaaggccattgaacgctcctatgacatccgggaggaaaacggacggcgcacggccacgcccagggaaaaccccatcctcacgggcatggatgacccggcgggggaactggaccggctccgcgccagggtggagcagctcaacgcggaatatgcccggtacaccgcagaggcgggcaggctgagggaacagcagggccgggacacgctcgtgtacgccctgggagacggggagaggaaggaaaccggcatggacaaaatcgtttacggctaccagccgaacgacctgggcttcttcggcaaatgcggcgtcttcctccacaacctgtaccacttcatcatggatgacccgcgggaggccaacacggaaggcggcatcttccccgccatcttcggcaccttcatcatgaccctgctcatgagcgcgctggtcacgcccgtgggggtcatcggcgccatctacctgcgggaatacgcccggcagggagccctggtgcaggccgtgcgcatctgcgtgaacaacctggcgggcgtgccttccatcgtcttcggcgtcttcggcctcggcttcttcgtctactacctgggcggaacgattgacgaactcttctactggaaaaagctggccgtggacaacacgcccaccttcggcacctccggcatcctgtgggcctccctcacgctggccctgatgacgctgcccgtcgtcatcgtctccacggaggaagccctctccgccgtcccccgcgggctgcgggaggcggccctggcctgcggagcctccaaatggcagatgatcaagcgcatcatccttcccagcgccctgccgggcgtcatgaccggcctcattctggccatggcccgcggcgcgggggaagtggccccactcatggtcacgggcgtggtgaagctggccccttccctgcccattgacggggaaggccccttcatccacctggagcgcaaattcatgcacttgggcttccacatctatgacgtggggttccagtctccggattcggacgccgcccagcccatggtcttcgccaccactctgctgctcatcctgctggtggtggtcatgaacctcacggccatcctcatccgcaaccgcctgcgcaaaaaatacgcggcctccagcttctaaccccgttctccttcaccatcccatgactgaaccagccgccccagacgacgatcccatcattgaagtggaagatttctccttcttttacggaagcaaacaggttctcttcaacatcggcatgacctttgaaaccaaccgcgtgacggccctcatcgggccctccggctgcggaaaatccaccctgctccgcaacatcaaccgcatgaacgacctggttccggacgtccgccaccagggggacatccgcattgacggcaccagcctgtacgatccgcgcgtggaagtcatctccctgcgcaagcgcgtgggcatggtcttccagaaatacaaccctttcccgaagagcatttatgaaaacatcgtctttcccctccgcgtggcgggacgcagcaggcgcgcggaactggatgaaaccgtggaacgcagcctgaaaggcgccgccctgtgggacgaagtgaaggacaagctgcacgaaagcgcctacggcctttccggaggccagcagcagcggctgtgcatcgcccgcgccatcgccaaccgcccccagatcctgctgatggacgagccctgcgccgccctggaccccatcgccacgctgaaaatagaagacctgatggaagacctgaaaaaagacctcaccatcgtcatcgtcacccacaacatgcagcaggccacgcgcattgcggaccgcaccgccttcatgtacatgggccgcctggtggaatacggggaaacgtcccaaatcttcaccaaccccgcggaaaaagaaacggaagcctacatcacgggccgtttcagctaaaaagcccaacttccaagccattcacctcatgacacctcccggcaaccacatcctcccccactatgacgcggccctgaacgccatccgcacccgcgtcaacgccgtctgcggcagcctgctgaaacacatggacgtcctggaacgggtcatctccggcccggacagcgacggggccaacggcatcattgcggacggggaaccgctcagcgaagaaacccgccaggttctctccctctgcgccgccgtgctcacccagttccatcccctggggtccgacctgcggcttgtgctcaccttttcccgctgcggggacaagctccaggaatgcatggaggaagtcacgggcatcgccaggcacgccaaggcgtccatcaggcgccgggagtccctatgcacggatatagtgctccccctgctggacatggccgtctccgaattccgggacgccgcacggtgcctggaaacgcaggacgcggacgccgcacgggaaatacgcctgcgggacaaaaagctggacaaggcccaccgcaaggcgctggccctgctggtatccccggaaagggaaaacacgccctccctcaacgtcaacctgctcttcatcatccgctccctggagcgcatcggagacattgccaaaaccatcgccgccaccgtcgtcttcctgaaggaagccacggacatccgccacggaaaagagaaataaaccgcgtattttccgccgattattccgccttgctcacgctgaagcagtacacggcggggttgatcagggccagggggaggtagaacacggcaaaggacagggagccgccgtacaaaaccaggcacagggcggaaacgataaacaggattccgattttaaggctccgcgcccagtcctggcggttcaccagccagatgaaggccgcgcatacaaagccgatgaccacgcacagcaccccgcccatggtgaggaactgaatataactggaacagaattgttccagccaccgcacattatccggactggggggattaccttcccaggcaaaaacgcccggcggcagcagcgcccacaacagcacggaaaagaacaccaggcgatccgtattaaggcgataggtcatgcgggggtacggtaccatttccgtgcatgggataacaagtgaaatcagctgctcccggctgttccgggaacggttcctttacaggggagcaaatgcaccgtctccggcgccattgacggcgattccgtctatttccaccagccagccgggacggcagacgggggctttcaacagcagatgggggacggcggccagcggggattccatcaggcggcggctgaccgtttcccggtccgcccagtcgcgcaggtacaccacggcctgtttgaggtcggacaggcttccgccgttcctttccatcagggcgttcatgttttccagggtgcgggccgtctgccgcgctacatcccccgggtgaacgatgttcccctccgcgtcaatgctggccgtgccggaaaggaagtagtgggagcggtccccgtacacgatgcgggcgccgcgttcaaaggccacccggtacagatgcgtgggggacaggtaatccggagcctccatgtaacggacctgccccggcttcagcccgacgattcccaggctgtccatgtgcagcagccgccccggcgtttccgtacagccttcaatcccggtgctggcgatgaagtgggtttccggcgtcagcccgtaacggtcaaagcgttcattgcgtccttccaccagtccgcggtagttgttgtcaatgtcccggcagtaaatccacgtgcggtgaaccagctccggcacggttcctccgtgcgcggcagccgcgcggtccagccagcggaattcctcccgcatctggccgtagctgtccggagcggagctttccttcctgcccgccaggaacagccggtaatgcggacgccgggccgtcaccaccgttcccccctggtcctctttccgccttttttccagcattccgccgatgtgccatgcttccagggccacgcgggccccgttcgcgggaggctgccccaccacggagacataggagttccgctcccccgccatccggcgcagcgtttccgattggcgcatcggatcgctgacgtggaagcgcagcaggaattcatcttcccctccgccgcccagttcgcggtacctgcccatcagggaacgcagttccgcctcaaagttcgcgcccggttccgccgtcatgcagaagaaatgttcttccgcgccgccctttccgcgccattccagtttttcaggtaaattagccgccatggtgtcctcctttacagggactgcacgtaattgaccaggtcctccagctcacggtcatttaaagaacttgtcttcccgcggatgtcccccggattgtgcgtcgtaatggcttcccggatcgtcttcgcccggccgtcgtgcaggtagggggcggtccgccacacttccaccagggagggcaccagaatgcttttcccctcatccagccccgtggccgtccccgcagccaccagttccttggtagtgaagtacgggtgcgggtggcactgcacgcacccggccgttttaaagacttccttccccctccgcgcggattcggacaaggagccccgctccactccgggagcatggcactgcgcgcaggaggcctgtttcgtctgctctttggagggagaaccggccatcaggaacgggctgggaacttccttcatgtttttcaggtattcattcacgcattccgccagttccccggaaggttccagaaactggatgtgaacgaagcccgccgtcacggccacctccgcggaggcgcggacgcccagcgtcatcaccgggctcgtccggtgggagaggaacatggtgcgcgtgtttttcgggttgcccatgccgtcattcagcaggtcccagttcaggccgtccacccggctgtccgggtggcaggtggcgcagctctgccaaccctggaagcaatgggaggcgtcgttgaagtactgttcccccagcttttcccgtgagggctggaatccttcattcagggcgattttccggggttgcgcttcccccttgagggggacttgcgccagcgtgtccgagaagtatccggccacataaacgtttttcccgtcgcacgccagggagcgcggaccgttcagggacagaggaatgcgggtgcggaggccgtgcaggaagcccagcctttcggaaacgggttcgttttcccggtcttcccgcttcatgcggtccagcaggccgggaaaatcaatcacggataactcatgcgttcccgcgtgcgtcacaaacagctttccgccatccccggaaaaggcgacgccccagggattggccgcccccgcatccgggtcgtccagcaggacggggtgcggcttgtccggctgttccgtatcaataaccgtcacggcgttcgtgttcatccagccgcggtccagctgcgtggtgggcacctggtagcggctcagcacgtgcgccacggccagataacggccatccgggctcatcgccatgccgcgcacgccctgcgtcccgttggagagcgggaaatgagccgccttcccgtcttccaccagggtcagcgcagccgccgtgaaatccccgtccgccttcccggcgggcaaatggccggcggcccatattttcctgccgtccggggagacggccagcgccaccggttcacggggaacattccaggaattcagcacgttcccggtagcggcgtccatttccagcacacgggaatcaaaccggcacgccacatacaacttacctccgcgcagcacgggagccatgggcgtatgccccgccggaaaggaacctttcagcgccccgctttccaggtccaccacctccaccacgccgcgcggtccgccttccgccacataggcggtggaaccgtcaagcgccatgccgttgggcggctggcccagacggatgcttttcaccttttccccggaagctgggtccaccagttccagggtacggttttcatgccccagcacggctaccaggcgattgaaaacctttacatccaccggagctgcgggaccggaggcatgcgccgcatcctgcctgcacgagacgaaggacagcaggcagaagagggcagccgcggaggcgcagagcgtttttgtcaatttcatggccatttcagattcagtcttctatcatcacgcggaaccccacgttgtacacgggccgccagccgggatacccccagcgccaggaggacgtggcccgccgggggcggtcataccaggaaccgccgcgcacggcacggggaacgcgggagtccaggctttcattgcgcccgtccccttccttccacgggtagggcctgtattcggaacgggtccattccgcggcgtttccgatcatgtcgtacagtccgtaggcattcggcttgtagctcttgacgggggccagatgaagcttcccgtcattatatttttcatcccgcggcacgaagtcccagaaacggttgggatttttaatcggcttggggtccacgccggagacggcaagctccttcagcgtcacatcccccaggttggcgtatgcggagaagtccgcatcccgttccccgaagaagaagtccgtatccgcgccgcccctcgccgcgtattcccactgcgcttccgtgggcagcgttacctttttccccgttttcccggaaagccagcggcagaattccatggccctggtccacggcacccggatgaccggaaaacgcggatcggcgtccatgtcgtagccgggcctcacctggtccttgtagtgcatgtcgtaccatccgttgaggtattccgggtcaaagcggcggtattgctccagcgtcacttccgcctctcccatccagaacggttgttcaatctccaccggggaggcgggtttttccgccggggtttcccgttcacttcccatcctgaattttcccgcgggaatgcggcggaacgtcatgcttacgccaccccccaaatccacggacagcgtttcattccgcggttccgggacgggcacgctttttttccctgacgctggggacagacttgccgccgtcaacgatgacgccgctggcgtttctccggaacagggagtccttcatcgtcacgtaattccgttccgctccggagaattgcctgtgcaggtcatagcggcgtttcagcaatccttcattgcgctctcccggccattcgcccaggtagggggcgttcatgtccatccacgtgaccaggcggttccagtcctcctgcggcatctccacgccgtggtgcccctttttaaggagctggtaaagttccgacgtatccgcgaagaactccgtgggggccagccccaggtagttcccttccggcccgttgcggcgcacgtaggggtgcaggttccagtacgcgacggacccgggagcgggcgcacccttgacggcctccaatgtcatgaagtccgggactcccgcgcgggccttgtcttccgcggtgtggcagcggacgcagtggcggtccagcacgggctgcacttcattcatgaaggagaaggtgcgcgccggaccgtaccacggggtgatggcggcaggcttctgccgggaggccatgaccgccttggcgggcggagcgtagttctgccgttcatggcagccgatgcagcttaacgtttcccccggcatggcggaaaaccagctccgcatcagcgccagggcgcgcccttccccgtccagtacctggagggtcagtggctggttggccggagccgtaaagatggcggagccgtcaggattcacgggaacggtgccgtacagcaccttcaagtcccagttgctttccatgcccatggcatagtggcttccggtgttgcgggggctgtactcggacatgaagacgcgcagggattttgccacccccttcggcactccggccatggcgcggccccggtacacgtcggagatatagaccgtggccgtcttgctctccggcttcacgcggtcatggagcacgggcggctttttgcgcgggcgcagcggcgcggggtccgcataaatgaaataggaggaagccgtgagaggaacgatgttgtcgtacacgtcgcaccagaccacattggtcacgccctggttgccggaaggggaggagacggccaggaaggtctcctcattcagcggatacggttccgcaaaatagggagttttcaacccctccaccaactggtccctggtgacgttttccacgggttttccgtagcccgggattttctgcacggcgccctccgtggcggtacggccccggttcacgtcaaagatgaccagttccccaagccgcttgacaccatggtgcccgctcacaatgcccgcgaacatgcccggcctgccgggaagcgggcgggcgttgaacaggctgttgggccagtaggagttggagccgtagtattccttctggtcgctgccgtccggattcatgtgcatcagcacgcggctgaagtagtgggcgctctccgtgtattcccagcgcaggaacatcacgcggccgtccggcagcatggtggggaaccagttgttatcctggtcaaaggtgagccgccgggtcgtcttcctctcccggtcgtaaaggtggatgttccccacgtagtccaccccggttacgcagggcacgccctgcatgccggaggtgttgacgaagatgacgcggccgtccggcaggtagcaggagttgtagctgtccgtatccgccggcatgtgggcggtgagggcttccgttttcccggttttcaggtccagttcaaagacgtcccagggcctgttttccttcttgccgaagcggtttccggtgaacatgagcctttccccggaaaagtccacttccagatgccccatccagcggtcgtcccccagcagctgcgccgcgggggaggaagaggagatgccgtcaaatttcacgatgccgctgcggtatgtgcggcccggacccggcatgctggagattccctgccagttggccgggcggtcatgattgaaggagctttttccggacgggttgaaacgccgcacgctcacccattcccgcagggagtcctgttccggcagggattcaataagggcctttttccgcaattccaccagttcacgcaattggtccgcctgctccggccctgcccggtccacccaccggtccagcggccccagcttcttctcccattcatccagccgggacaggaaaatctcagcatcagggtaccgttccccgtatttttcccggttgcgtttcaccgcgcggcggatggcggccgcatcataataagccgccagtttcttcagcctgagaaaacggactctttccaggatggcttcctgatgcttcatcaggccgtcccaggaagaaacggctcccacccgctccgccggaacggaaaggatttccgccagtgcggccccggctttctgcccgtccggccatgcctggaacacgggagccagcagcgccatcgcatccccgcagtcatccgcggcagacggatcggaaagggaagatacatgttccgccgtccgcgcccacacctgctgcatccattggtttcttccctctgcggaggccgcgagcgggattccggacaattcccgcagccagggctgcagtccggaagcgtggagtattccggctcccagtacggcacagccgcaggagagaaggcgcaggatggaacatgagtcaaacatggcgtacagttttacactagtacgcaggagaaattctttttcattcaacgggaatttccgtaccgattaattttctgcctaatcagcagagggtgaatccatcatttaatccctccgggctctcaattccggaattcaatatctgattttaagggaaggaggttgtggaaaaacggctcaggcagaaagcggcatggggaatcctaccggccgtcctccatgcccaggatttttttcatggcaggcccggactcactcccccattgctccaactgcctgacgacgggaattaacgtcttcccggacagggaacgggagaatgagcagcggcatttctccgttcatccccggcatccgggaaaaacaagcgccggagaaagagggaacagccgtttgcctttcttccggcggccttgttgttacattcctgcggaataggaagttcaggaatcttccagcgtgcgggggcgcagcaggtacaccttgtcccggcggcgcacctgttccggaaccgccagatagacggtttcccctttttgagcggcgtccacgggttccattcccgccggcgtctcccgccgcatggattccacttccacgcggacggctcccgtggtggggcctgcaatgaggatggtctgccccgcggacaagccgccggcttccagataaagggccgccaccccgttcttcttataaaagttttccaccttggcaatgtggattttcagcagggcggcgcggctgttggcggaaccgctccattccccccatttcacgcccaggtaatacccgccctgccagaatccgcggttgaagacggattccagccgttccatccacgcttccgtcctgtccgcggaaaaggtgccgtccaggcatgcctgggcggcttcacggtacacggaggtgaccgttctgacgtaatccgaggagcggccgcgcccctccagcttcagcacggagacgcccgcgtccagaagctggtccagcaccggaacggtgcacaggtcccggggggacatcacgtatttgttgtctatcaccagttcattgcccgtttcctcatccgtcacgcggtaggcgcggcggcagttctggaagcaggcgccccggttggcggaagagttgtaagccgccaggctcatgtggcatttgccggacacggccacgcacagcgccccgtgggcaaagatttccacccggagcagttccccggaggggcccctcacgtcctccttccggatggattcaatgatgtgccggatttgcgccagggtgagttcccgtgccagcaccaccacatccgcgtactgcgcgtagaacctgacggaggccatgttgcagacgttggcctgcacggacatgtggacttccagcccgatggagcgggcatgggcgattaccgccaggtcggaggcgatgacggcgtccactccggccttccgggcggcggcgcacagggcctgcaccgcctccagctcttcatcatacacgatgatgttcagcgtcaggtaggccttagcccccgcctcatggcagcgggccacgatttccggcaggtcttcctctgaaaagttggccgtggcccgggaacgcatgttcagcttccccacgccgaagtagacggagtccgccccgccctgcaacgcagcggccagggattcaaacgaccccgccggggccatgatttctatccgggattgaacgggcatggcagaacggctcagagtcctccggattcctccgtcaggatgacggtgatccttcccttggggaagcatttgacgatggacatgtggatgttgcacaggcggtccggagagttgcagtccgcacagactcccgtgtacatgcagggcgtcttgaagtcttcatggcgtttggcattcagcggggcgatgcggcggatgcgttcccgcgcctcctccggcgttcccaccagcttgttggccccggccagcagaatgacgtgccgggggccgaacgctacgggtgccacgcggttgcccaccatgtccacccagtgcagggttcccttcatgctgacggcgttgacgccggtcaggaagaggtccgccgtcatgccgcggcggcggatttcccatttttcctcccggtccatgtccggaagaaagccgtcataaaactgaatgtccggattggcccgcaggtcgtcaagaatccccgtggccttcaaggtcatggagtccccgtaggaggcggacgccgggtgaagctcccgtaccaggccgcgcatcacgcctgcggcttccttcaggcccggaactacaaagcttctgaatccgcgccgttccaggcgttcggcgcacttttgcagggaaagggtttcttccataaaaaaggcggatgaagaaccccgctccggctgattccggagcggggttccttgagtttttattcttccgcaggggcttccgcttcaccggaatcttccccggcctccgcgtcttccgctccctccgcaccttcctcgtcttcatcatccggaatgacgatggagatgtcctggatggcttcgccgtcgttcagcgtcatgagcttcacgccctgggtggcgcggcccgtttcgcgcacggtggctaccttgatgcggacggactgccccgccgtggtcatgagcatcagttcatcctcctcggaaacgaccgtggcggataccaccttcccggtcttgtccgtgcagttcatggtcttgatgccggtgccgccgcggccctgcgtgcggtattcgtcaaaggaggtgcgcttgccaaggccgttttcagaggccaccagcagggttttctgcgggtccacaatggcaagggccaccacgtagtctccctcgcgcggacggatgccgcgcacgccgatggtgttgcggccctgggtgcggagggcttcctccgggaagcggatgctcatgccgtcatgcgtgacgagcacgatttcattttccccggtggtgagttcagcgtttaccagggtgttgccttcctccaggttgatggcgatgatgccggccttgcggtagttgacaaagtcgttcaggctggttttcttcaccgtgccgtccttcgtcgcgaagaccacgttgccgctgccttccgcaaaggtgatgtcattgcctttttcatccacccggcgttccaggcgcaggatggcggcgatggcttcctccggctggaggtccagcaggttcttgatgttgcggccctgcgcactgcgtgcggcttcgtcaatttcatacacgcggtccacgtacacgcgcccggtgttcgtgaagaacatcaggtagtcatggttttgggcggcgaagaggtgctcgatgaagtccgcctccgcatcctttctggcccccttggtggtggcggccttcacgcccttgcccccacgggcctgcacgcggtattccgcggagttggtgcgcttgatgtagccgctgtgcgtgatggtgacgatcatcgtgtcgttcgggatcaggtcttcaatggccatgtccccggagaagggaatgatgcgcgtgacgcgcggcgtggcgtacttgtccttgatggccatgagttcatccttcacgattcccagcacgcgggattcgttcgccaggatgtccagatagtccttgatccggaccagcagttccgcgtattccccggaaatcttgtcgttttccagagcggtgagctggtacaggcgcaggtccaggatggagtttacctggcgttccgtaaagatgtagcggtccccctgcacggaggcctgggaacggatcaggatgcccaggctttccgccgtctgcgtggagaaggtgtagttctggaggcgttcgcgggcttcctccctgttcttggagtcgcggatgatggtgatgaagtcatccatgtggtgaagggccagcaggaaggcttccaggcgttcggcgtccttttccgcatcccccagcaggtagcgcgtgcggcgcacgaccacctcccggcggtgctcgatgtagaagttgatggcgtccagcatcgcgagcgtcttggggcggttgtcgtgaatcgccagcatgttcaccgcaaaggaggtttccatggaggtgagcttgtaaagctggttcatgaccacctgcgggcgggcgtcccgcttgagctcgatttcaatgcaggttttctcgtcggaaaggtcgcggatgccggaaatgtccgtcaggatcttgtccttgtacagttccgcgatgcgttcctggagggcggcgcggttcacgccgtacggcacttcacggatgatgaggaggtccttgccggagtccgtcatttccatgtctatcttcccgcggatgcgcacggagccgcgcccggtgcggaagtagttgtcaatgccggaaaagcccagcacgtcgcccccggtggggaagtccggtcccttgatgtactggcgcagttcatccaccgtcatgagcgggttgtcaatcacggcgcagatgccgtccaccacttcccccaggttgtgcgggggcatgttggttgccatccccacggcaatgcccgtgccgccgttgaccaacaggttcgggaaggcggagggaaacacggtgggttccgtgtgctcgttgtcgtacgtgggaacaaagtccacggtgtccttgtccaggtccgccatcagggccacgcccatgccggagagcttggcttccgtgtatcgggcggcagcgggggggtccccgtccggcgtgccgaagttgccctgcccgatgacgaggatgtcccgcatggaccagtcctgggccatgttcaccagggtgccgtaaatggcggcgtccccgtgcgggtggtagttacccatggtgtcacccacgattttggagcatttgcgggtcttcccgccgggggacaggttcagttccttcatggcgtacaggatacgcctctgggagggcttgaggccgtctctcacgtccggcagggcgcgggagatgatgacggacatggagtagtccaggaaagaagtggagagctcgctggctacgtccaccggtttgattctattgttttccatggttctgggagaaagtgtaggaattaaacgtcaaggttgcggacgttgagcgcgtggtccacgatgtagttcttgcggggctccaccacgtcccccatcaggatggtgaacatttcatcagccctgacggcgttgtcgtcattcaggatgacgcggagcaactcccgccgttccgggtccatcgtcgtcttgaacaggtccttggcgtccatttcacccaagcccttgaatcgcgtgatttccacgccgcgcttgccgatggagatgacggattccagaatgtccatcacggagaacaggggcgttaccttttccttttctccctcaccttccaccagttcaaacaggggcgtatccatggatacgatcatgttccccggaatgcccagctccgcaagccgtacgagggcccgcgtgatggccttggcctcatgcagttcatgggtgatggaacggcggctggggccctcccggtccgggagcggattttccagcagttcctcttccgtgggcatgccgaagatgaagaggtccctgttttcctcggaaaaggcagtgagagcttccatgtcatggaagaagaggacttcctcttcattgccgctgcgcaccttcaccaggaattccgggaattccccgtttgcctcccggtggctgagcaggtcttccagggagccgccctgcgcctgcatggattccgtgtagcgctggaggttgaccagcgtttccagaatggcggaaaactcgtcagatgagaaggaacgggaaccgtccgcgaaacggagggtcacgtcattgacggccagttcaatcaatttgcggttcagggcgacgtcatcctgcacgtattcctcctttttcctgcggatgatgcggtacagaggcgcctgcgcgatgtacaggtacccggcgcggacaagctgcggcatgtggcggcagaagaaggtgagaagcagggtgcggatatgggcgccgtccacgtcggcgtcagtcatgatgatgatcttgtggtagcgcacgcggtccagcttgaaggaggcctcatcgtccccttccccgatcccggcgccgatggccgtgatcatgttctgaatttccttgctccccagcgctttgtccaggcgggccttttccacgttcagcaccttcccgcgcaggggcaggatggcctgcgtgcggcggtcgcgccccatcttggcggagccgccggcggagtcaccttccacaatgaacagttcgcaattggcggggtcccggtcggagcagtccgccagcttgccgggaaggccgccgatggagagggcgctcttgcggaccgtttcgcgtgccttgcgggcggcttcacgggcccgggcggccgtgatgctcttttcgatgatcttcttggccatcgccgggttttcttcaaagtacgtcttgatttcctcgtacacgacgttacccaccacgccttcaatctccgtgttcaccagcttgtccttcgtctgggaggagaagcgcgggttgggcatcttgacggagatgaccgccaccaggccttcgcgcacgtcctccccgctcagggaggggtccttctccttcagcaggccgttcgccttcgcgtagccgttgatcacgcgcgtcagggcgccgcggaaaccggaaaggtgcgttccgccgtccccgttgtaaatggagttggcaaagcagaggatgttcgtttcatacgtattgttgtactggaacaccacgtccaccaggacgtcatcctccatcttcttgccgtcgtactccacttccaccttccggacgccggaaatggagatgggttcctcattgatcaattccttgttccggcccagctggcgcacgaattccacaatgccttccttatagaagaaggtttcccggcgcaccggggcctcccgctcgtcaatcagctcgatgaccaggccggggttcaggaaagccagttcgcgcaggcgcgtcgtcaggcggtcaaatttgaactccgtggtatccgtgaaaatggtggagtccgggaaaaaagtgatcgtggtgcccgtgatttcacaggcgcaggcgcccaccgcgcggaggggttcgatcgtcttgccgcgttcaaacttgatctggtagcgcttgccgtcgcggcgcacttccgccctgaaccagtcggacagggcattcacgcacttggcgcccaccccgtgcaaaccgccggagtacttgtaggcgccctggccgaacttgccgcccgcgtgcagattggtcagcaccagttccacggcggggatgccgaacttcgggtggatatccaccggaatgccgcgcccgttgtccaccacggaaatggagccgtccacatggatcacaatgtcaatcttgctgcaatagccggccagatgctcgtcaatggagttgtccagcacttcaaatacgcagtggtgcaagcctctctcgtcagggtccccgatgtacatgccggggcgcttccgcacggcctccaggccctccagtttgtcaatctgcgcggcaccgtattcatgctgcgccgtcgtggaaacggtggtttcaacaacctcgttggtatcttcggacataactgaaatatactacgcttatcttaattttttgcaagactaatgttagaaagcgcgcgtgcgcgtgtgggggctacctccgcaaaaacccgctgtaatcgcataaaaacaggcctatttctcgccgcccggttttttctgacatcagatagcggacaagggggtgcaggagcattctgcgcggttttatagaattggaagggacgttccgtgcggagggcggagagcggcgcggggagagttgtggacagaatggacttcatggacaggatggacaccattttctttctcctcctctgtccttcccatccacacggtctattactccggaggacgccgtttccttacacagcagggccgttccggacaatgccggaacggctctggcggtgcggagagcggatgatctccactctcctctcttaactctcaactctcttagaagtcatagcggtagcccacgcttccgttcacggagttggctccgtcacggaagtccgcgttcccgttgatgaagaccgttccctgcgttcctaccggcacgctcagccccgctcctatttgcagagccgtcgttcccaccttggtcccacgcacgctctgcatgaagccggggttgcccagcagcgccacattggtttctccgcggcggtcgcccatgtcctgggccgcgttcacccggaactcagccagcgcttctcgcccgaagatgttgctgccaatgagccccatccaccggccgcccagcgcaaccgttcccgtcgtccattcctgcttgcctacattcaggcccgcgttccccgctcccgtttccgtgtagccgtccatgcgcgtcgtcactaccgaggcgttggccaggggctgcaggatgctgctcctgtcttcgttgaggtacacgtcgtaggtcagttcatacatcgctccaaagccccacccgctggtgttgccctgcgtcctgtagctgccttccccgtagttgaccgtgcggttgagcttcgcgtcgttccacccacctgtcaggatgagcgtgtgggcccatctcttgctctggtagcgcccgaagaggttggcgtagtagctgtccaggtgaccgtccgccgtgtccgcggcactggccgtcaggtcgccgtagttggccgtgaaggcagctcccatggtgaagtggtcgctgaggtccacgtccatgcccacggtgccgccccaggtggtgagctggtagccgctttcatcccccttggtgtccagcttgctgtaggaccccgttccttccatccacatgtggaagtaggggaggtcttcgttgatgtaggcggggttgacgcccatgagggtggtgcggttcctgatccagcccatctggtcgcgcagggcgtccttctgggccgtgcccagcgcgttgaccgtgctgcccgctacggctgccatcacccgcttcgcttccgaggggttggaagacgtcagggcgcccacggcgtcatccaccttcttgaggatggagtccgcggccaggtccccgggcaggttccagagaagttccgcaccggccctggagttgacggtatccgcaatacgggcgtacttgttgtccttggaagccgtagccaccagaacgaggttgccgttttccatcaccaggtacgcattgttttcaaacttcttgaaagcggaggaggagggatccagcaggatagccagcctgtcgcttccacccaggtcgatggttccatcagcatgcatgagcgtgtagctgccgtccgcgcccagcgtcaattcattcctgccggtggagctgagggttatttccgctccctggctgatgctgatattcccggtcacgctgatgatgggtccggcgtagtccgtgttgaaggtgaggttcgtgctggacccgtcgcccagcgtcaggctgctgagggtaagagccgtattggctctcgggtcttctaccgtgccgcccatcttgatattgaggcgtcccgtgttgttgatgacccagttgctgccggcggcggtgatgacgttttcaagcgtctgccccgcattgccggagatgttgagctgcccgcggccttccagcgtgccgctgaagacggaaccgctgcccgaattgccggtattgacggccagagcgccgccattgctcttcaaggttccctggccgctgattccggcaacggtgttgccggtggttgagccaaggtcaagcgttcccgtggaatcgccgttctttaccaggtccagcagtacgccgccctggagggaagccgttccggaaagggcaagcgtatcatgaagggcaagcgtgccgctgccctggatggtgctggcggaaaggctgctggcatcgttaatggtgagggtggctccgctgccgatgttcaggtccgcgccttcgccgctgtccgtcaggtctcccatgacggtattacggttgacatccagaaccacgccttccgccgtgcctgccagcaccacatggttgaagttgctgccatcaccgttcagggtgagcgtgccgccttccatgcggagggtgtccgtcacaaaggagccgttgaccgtgagcttgcccgtgttctgcttgatgaaggtgaccccgttttccccaacgatgctgccgcccatgatggagtccgccccggcataatcatccggtgcgggcaatcccgtttccaggcgttcgttgttgaggatgacaacggcgttgcctccgtccgcattggtgttttccaccttcagcgtgcttcccgttgcgcccagcaggttgttgatgaccgcgccgtcgccgtcggtatcgccgggggctcccgccaactggacggtaagcgtcttgccctgggcgatcaccacgccggcgtacatgcccagcgttccgtagttcgtgaccgtatcgggatcagaggaggcggtgccgtccaccatgtaaaggccgttgacctgtccgctgaggaccaggctgccgccgtcggtgcccgtcacgcggatgccgtagttggaaaggattttgctgaactggatgtcgcccagattggcgcattccagcgttccggtcgtcagcgtcagccagctttccaccccggcgtccttatgggcgacgagggtgttcacaatggcgtcaatatccagattgaccgtggcggaatcattgatgacgagcttgccgtctccctggtcaatgatggccgtaccggccgctccctggttgacgttgtccgcgcccagggtaaggttcagcgtttccgtagctcccgcacccaccgtaatgtctccggagacgttggtgagcttgcctccggcagccagggtgatgcctttcagcatgtcgccattggtgccccccaggttgatggcggcggcggagtccaccacgatgcccgcggtggcgccttctccccgcgtcatggcggaggtcagtgatccgttaacgattttcagcgttcccgctccgttcagcacggtgccggcccactggccggccttgtccgccgtgccaagctggaccatggcgtcggcattcgtgatgccgagggctcccgtagcggtattggcctgatccaggatgagggtgcccgtgcccgcatgcgtcaggttggagttgccctgcaccagcgcattcagcaccagttccgcattgttgtaattgacgttgtactgcgcggccagggaggcgtccgtggagcccgtgttgcccgccaggatggcgccgtctccaaagatggcattccccgcacccgtgacgctcgcgccgccgttgccgaagttccagacctggcggctgttgttggcggaggtttcatcggtggacagggttcccgtgaagtccttgagggagcccgtgaggatattggtcatccgcacgttcgtggacatgccccatgcgcctgaaccggaaagattaccggagaaggtgtacgtggcgccggaagaaccgttctgcaccgtgccgtgggttgcgccgatttcaaagttggccgccgtcgtgcccgcggagaaatggaagcccttgccgtcgatgaaaatggtgccgcctcccagcgtattccccgcgccgaaagccgcccagttggcattggtactcatattttccccgtttccgagcagttccagacggccggtgaaattggtattgcccgtattggagatgttgacctgtcccgcggcatccgccgtcccaatggtgatggtgcccgcgccgttaagctgggcgtgcaggttgacggttccgccggagagggccagagaggcgccttcacttacgcggacgatggtggcgttattggggttcacgccgatggtcgctccgcccgtgaaggcaagcgttccctcttccacggtgaggtgggccagggtattcccggagtatcccagcgccagcgtgccgtcccccgtcttggtcagcgtggtgcccacgcccatgacgtcagccgtcagtccggcccaggagacagtgtcccctgccccgattacggaaacgttcagggagcctccgtctccaaccttgacgcggctggaaacgtcatatcccgtcacgtccctaccggcggcggagtccgcataagccagcgtaccgccgttaaaggtaatgtcacccgccgtacccagcgcgtcgtccgctccgatggtaagagtgcctccgttgagcactgtgccaccggtgtaggtattcgccaggttcagggtgacgttggccgtgccgttcacggtgagcgtagtgggggcaacggagtccgcaatataacccgcgttgtccggatcactgaccagcgtgtaagtgccgctgttgaagacgacgctcttgggagtcacggtaccggagaccttcacttcacccgcttccgcagcagagaaatagatttcctggtcgttcagcgtgtccacgcccgtcagcttggtggtccagccgtcaatgctggtgttgatccacttgcggtccgttccgccgtcccagacaaaaccgttgtctccgctgacgtccacgactttcagcacgagctggttgttttccaccacgacggagtattcaaagccttcccgggtgatgtccggcgtccaggtgaaggaatccgtggtcaggctgcccgccgcagcccactgggccaggacgtagtcggatgcttccagttcaccatagttgttgatggtcagcgtgcagttggcatccgtcagagccagggcccctgcctggatattgatgatcgggccgtttgccacgactccagtcatgtcaaaggtcagcgtagcgccgctgttcagcgtcagggcggaggccgtggtcattttggcgcccgcgcccatggagatgctgcccagggtcatggcgttcgcattcgtgaatgccagcgtgccggcctggacgttcgtcaagcccgtgtaggtattctgtccggagagggtcagcgtgccggaaccgactttcgtcaaaccgccggcgccggaaaggacgcccccgagggtgatgttggtggaagactggtcattgtatgatttggttcccgcatcgtattggcgggtatcaaccgtcacgttgccggcaagattcatgttataggcggaggaccagccttccgccgccgtcgttcccagggtcccggaattcatgttcaggacaatcgtattggtattgccggacgcagtcatgcctcccgctccgagaagcagggaaccgccattcagattaatggtggcgcccttggcggcggctccggcccaattctgccccagatccagcgtctgagccaggaccatgccgccttgttcaatgttcatgacccccttcccgtcacgggaaatccgcagggcgccggtaatgttcatgaaagcatccttcttgacagtgagcgtcgtcgtcccgttgtattcattacggccgatgaaacttccagccgtcagggaagcgccggaatccagcgtccaggaagcagccgcattcgcacccgccatcaaagtatagcttcccgttatattgacatcaccctgtaaaaccgttgtgccggcagcagatatcagagaaccggcgccggtgatcgtgtttccgtaagttccggcggaaagcgtcagggtagttcccgcgcccacatcatatttgacgccagtcagcgcggccgtcgtcgtgccggaggcattcccgctcagcttcagcgtacccgtggaattggcattcaggcgcgtgcccaagccgttccacgtgcccgtggtcagctccagaatggaattgccctggaggagaaccgtgcttgtgcccagcgcgccggcattgccgacgacgagcttgctgccgttatacaatacggtgtttccgctataggagttggcattgttgatggtcagggaagctccgtccagcagattcagcgtcgtatccccggtaatggagccgtcaccagcaaaaatgaaatccgtgccggaaacattaattttacccggagcaacattcccgacgatcgttacagtcttgttcacgtccgcaccatcggagaagtacacggtctgtccatcggcgtaagccgtgggagtgccgtcaaggtcccaggcggtattggaggtgtccgtgttccagttgccgctcttccatctcagcaggccgtccttgtcggacagggagacgtacagcgtatcatcgctgacggtgaatgtagccttgtaaagttcagccgcggagccgccgagcgtgaacatggacgtatccgtcatgcccgttccgtgcaggagggcatattccgtattggcggtgacggaggaaaggcctatctggagagccgtagcgccggtgcccgccactgaattgacggttaatgccgcggtatccgtactcagggatccaaagctcagggagcctccgttcagggtcagagcagccgccaaagtagcggtgcccccgtcaagattgatggttcccagcgtagagccggcatccagggaataaccgtctgcggaagtcacggctacggtcaggccgccgttgataagaagggccccctgcccgatgacgctggagtccttcacggtcagcgcgccttccctcaattccaccgtgccggtgaaaccgggaacggcggcggtttcaccttccgcgggaaccggaaccttggcagctccattgagcaccagggtgccggcgccgatcttcgtgagcttgccgctgccggtcaggccggtattaaaggtaatggttcttccggttgtcttgtccccggcgtccagggtatccacataacttccgttggaagccgccagcgtgatataggagggagtgaactcgttattgtaggtcacggaccagttggccgtggctcccagcgttcccatgccgagcgtaatttcactgccgctggcaaagttaacgatgttgccgccaaagttgacgcgggccgttccggccgttgcgcttcccaactggaatctcccgcggaatactccattgccattggcccagaagtccaggccgcccaggttggccgtgccgctggaagcaaggaaggtccccgttccgctgtacccaaggttcagcgcagcggagccggtaagaagccccccgttaagagtaagggtgctgccgttgtccacgataaagctgcggccggttccgtggtcgctgttggtgcccgtgacattcaactcggcgccggtgttgatggaaagggtcccgttcttgaggagccgcacgttcgtagcgttgacgacggaaccggagttgacctgaatggaactgctcgcccagttgctcgacatgctgagggttccgatggtggcctgcgaattggtgagggtgaagcccccgatgcagtaattgacggccaagccgcccaggttaaccgtattgttcaggaaggttacacggggaccgtaaccgccggaagcctggtccagctgcatggttcctgcatagtcaacgttgccggagatattcaggttgaggttttcactgcggcggaaggtgattgaactatcctgggtgacgcccgctcctcctacgatgtcggaggcgatcgtgaccgtatccgcggcattgtggttcatcaggacgtacatgccgccttcaacgacgatgcggtccgaaggacgaatcgttcccgctccggggcgaatgatgaaattggcgccgttgccgatatgcagggttgctccgttgagcgtgtccgccgcaggctggctggccgtattggcggcgtaattgccatatacggtgatgtccttcagcgtggatccaggagaaagggtgacgctcccgtccgtattgccgagccagacggaaagggaggagttcgtcccgcccatgacggtggaggagaaggactccatgagatgcgtggcgtctcccagcgtcagggaagcgttgttccccagcgtgaaggtattgcccgtgccgaaggtgatggaagaagcgatcgctgcggtcttcccttcggaaacgaggaggcccgcattattgccgagcgtgaaggttccccccgtaatggcggcgtccccaagcgtaagcgtcgcctggctgccgagggaaagggcttccgcctgaagggaatccccggctcccatgttcaaggtgtagttcgtcccgtcctggaacgttacggtaccggcgataatgttgccggtcaacgcaatggttttaaccccttccgcagccgtgaaaataacggagtcattgttcaggaaggaagtatccgtcttgcctccatctccactcttgtaccagcccgttccagtgttgctccaggtgccggtagtggaattccagacaagcgtttccatattgtagcctgttccctgatactgcacggacatgccggaaccgttggagacaagcacgaaattgccggctcccagctggtcggcggaatcgactctcgtcaatgcctcataggtgtcctccccggtttgcttccaaataagaagggaatccagggaagctcccagatcagccccggtggacatgaaatagcgggtcagcagggcatcgtccaccagctcgcggttggtaaccgtcagcgcttccatggcgcccgcaaccactacctctacattccacgtccggtcattcttggtcactgtagtggtatttgacaggttgatcatcccgtcaagcccgatgtgccagtagtggctgccggaaccggtaccgttgtcaaaattgagattgcctcccggagtggtcaggttcagcgtgccgtccacataaatattagcgtgcccctctgcctccatgctcttgatctggttgctgaaggtggtggaaagagtggatccggcgcctacgtaaacactgccgccccattgtcccaggctaacggacacattgctgttccccgtcacggagatgccgccgccatccgaagtgttgggaggagtgcccgtaaccgtaacgtctacatcattaaaaatcaaatgcgggcccttattctcctggcgggagggggcggcgtccccttcccagttgcccgccgtatctacggcatcgccttcccctgcccccgtccacgtaaaatcaggaccgccaaacgcgggagcttgccagaaatccgccgatgtggcggcatgggagtaagagtaaaaaccggagaaggaaaccagggatgcaagaagggcggaacgcaaagaaggggggagatgaagtctcatattgtatcaatgatattatgaccagtaatacccggatttataatccgttggcaagcctattttcgttaatgactcttcttaagcaaatcatgaaggggaataaaacaggcttccttaaactatctctccatccatttcaaaaatcattaatgcaatacttttaatacaagcaagatatggaagtttaaagaagaagaaggattataaattcccagattgaccgttcaccctcctgatgaaggcggtacctgcaaaaacaaaaaggccgtcccctcacgggaacggccctggcttggaaatcttaccttattgctgctgggcgccgctctgcttgagcatctcctggagctgttccggggaaatgctcatgggaccgccctggggagccggggcttccgaaatgccgtccagttccagatcaaagatgagcggggaattgggctcgatcggagcgccgggggtgttttcaccgtaggccagctcggaagggatgtacacgatccacttggagccgacgggcatggtggtcagcgcctcggcaaagccggggatgacctggaggggaagttccacggatttgcccttggtgtcgtcaaacacggtgccgtccagcagcgtgcccttgtacttcaccttgaacatggggttcttgaacttcttctcgtcaaatttttcttcgccgcccttgttcaccaccttgtactggaggccggatttcgtggtggtcacgccttccttcttgccgttttcctccatgaacttcttgctggcttccagattggacttggccttggcggagatgcgttcgtcaatctgcttctggaacgcgtccagggcgggtttcagctgttcctggtccttggcgggcttgcggaccatgccgtccttgatgccctgaaggaaggattcctggtccaggtcgtcaaaggtaagggtgggaatggagccgagctgctgtccgctctggaaacccagaaaatagcccaggtcctttttcatctgttcgggagacacagtaatttctttctcttgtttgggttggtcggccgccggagcttcggcagccttttcttgcgcgcccgccacacccgccagaagggcggaaacggcaaacagggcgatggaagggttcatcttcatggttgttttttatcctttgtttgaaaagaggactcctttttaacggattccgttcacagaacaagacaagagaatcagtcatcctgtcatccgttcctccaggagcggcggaacgtcctccggtcaaaagacgcagcgggttatgcaagcgtttccagaacgcgggcgatcatggcgggataaagggcatgctcctgctcctgaatgcgggcgtgcaggctttccggcgtatcccccggcagcacgggcacgcgcgcctgccccaggatggggcccgtgtccatgccgtcatccacgtagtgaacggtgcagccgctttccgccgcaccggccttcacggcctgctcccaggcatgaaggccggggaaggaaggaaggagggaaggatgaatgttcagaatgcgggaagggaattccttcagcagcggatgcttcaccaggcgcatgaatccggccaggcaaacgcagtccacgccgtattccttcaggcgcgcggcgacggcggcctgggacgcctccgggaatttggttttaaatcccccgcagtcgatcacctccgccgggatgccccaggaacgggcgcgttccagaatgtaggcgtccggattgtcagacatcaccacggcaatttccgcccggagggagccggaccggatggcgtcataaatggactggcagttggaaccagaaccggaaccgagtattcctaatttgggcaacttggacatccgggggatgaaaccacagttttttgcccgtggcaagtctccggcttgacaaaaaggccccggtattcgcctaataaaggcatgagagacacccgttttcaggccctggcggcccagcttgcagggtattccaccaccctgcgtcccggagaccgggttctgctggaattaacggatattccggaggaaatgggaatagcccttatccgggaggtacgcgccgcaggcgcaatgcccttcctgcgcctgaaccagtcccggctgaaccgggaaatgctctccggagccacggaggagcaatacggcatcatcggccgccaccgcctggcggaaatggaggagatggacgcctatatagaaatacgcggcggcgggaacgcctttgagctgtccgccgttccccagaagaatatggccgttgccatgaaggccctgaaccccgtctcccagaggcgcatccgccacacgcgctggtgcgggctgcgctggccgtcagagggaatggcccagcaggccgccatgagcacggaagagtttgaggatttctatttccgcacctgcctgatggattacggcgccctgcgccccgccatgcagaagctggccgccatgatggaggcggcggaacacgtgcgcatcaccggaccgggaacggacatttccttttccatcaaggggttgcccgccatcccgtgcgcgggggaatgcaacctgccggacggggaggtgttcaccgcacccgtcattgacagcgccaacggccgcatttccttcaacaccccgagcctgttccagggcattccctttgacaacatcagcctgacgctggaaaacggcctggtggtgcatgcggaggcgggggacaagaccgcggagctcaactccattctggacacggaccccggcgcgcggcggctgggggaattcgccttcggcgtcaatccggccatcacccgccccatgcgcaacatcctgtttgacgagaaaatctccggctccttccacctgacgccgggacaggcctaccacgtggcggacaacggcaaccagtcccgcatccactgggacatggtatgcatccagacggcagcagccggcggaggcgatatttacctggacggcgtcctggtgcgccgcaacggcttgttcaccatgccggaactggctattctcaatcccgcccaatcatgactacggactccaccccctccaaaaaacgctccctgctccgcaaactcctgtacgcagccgcggcagtcattctgctggggtccctactggcctcctacatgaactgggaggccaaccatctggaattcagtgaaaacaccgctccagcgggctgcgttccgggactttccggactgcgcatcctggtgctgtcagacgtccacaccaatcttcccctgctggaaaaagcggcggccatggcggaacaggccaggccggacatgatcgtgttcctgggagacctgtacacggattttctgcgggccacccacgcaggaggctacatcacgcagatgaaacggctctcttccatcgccccggcctacgcgtgcctgggcaaccatgacatggccctggtggacaacgtggagcgcatcctgaaggaaggcggtttcaccctgctgaggaattccgcagccttcgtcaccatccccaggctggggaacgcggagttcaagctggtgggactgggagacctgcgcgagggggacttctttccggaccggtgcatgagtccgcgggaattgggggaagaatccgtgatgcccaccatcgtcctgagccacaaccccaaggggagggaattgctgggcggctatcactggaacctgatgctctccggccatacgcacggcggccagatcaaactgcccttcttttccacccccctgctgacgtcggagggggaaacgatgtactccggcttccatccttatgaagacaagcaggtcttcgtcacccgcggcataggctacatagggccgggacgcttcaactgcccgccggaaatcaacctcatcaccattccatagccccttttcccgaccgccatggttctctctctgctggcttccggaggccccaacgccgcgcctcccttcttcaccctgctcaccgtcgtcttcatgggcatcattgcgattgccctcattctggcccatttccggcagtccctgctggcgggctacttcatctgcggggtgattctggccaactgcggcatcctggaccacatccccaattccgacgtcagcatccaggccctttccgaggtgggcatcatcctgctcatgttcacgctgggcctggaattttccattgacgagctcaagcacctgcggaaaacggccctggtcggcggcggcatccagatgttcatctgcaccgccgccttcggcctggggctccattacgccacgggcatggatatgagccattccctgacagtcggggccatcatgggcctttcctccacggcggtggcgctgaaatccttccaggaattcggcctgagcggcacctccggggcaaaaatggcggtaggcatcgccctgttccaggacattgccgccatcatgctggtggcgatcatgccgcagatcttcgccgccacgcccgactcctgggaaaccgctctcaacatcggcatggccgtcctgcgggggctcgtcttcctgggggccgcatggctgatcggccactacctgctcccgcgcatcatgctggccgtggcccggaccaagagccgggagctcttcaccctgatggtcttcgccatctgttccggcatcgccatgctcgccagcctgctgggcctgagcattgcgctgggggccttcaccgccgggcttttcgtcagcagctcctactacagccaccgcgtcctcagtgaagtgctccccttcaaggaccttttcctgaccatcttcttcgtttccgccgggctgctgattgacattgacgacctgtgggagcacatcggccatgtggcgaccttcgccgcctttgtcctcgcgatcaaattcgtggcctgcatcgtggccgcaagcttcctgaaaatccccggccgcatgggcatcatggcctccaccgcgctgaccaacgtaggggaattctccctggtgctcatccccttcatgcaggaaatcacccccattccggcgctggtgaccaccaatgtgtacgccattgccgccgtctccatgggcatgacgcccctgctgatgaaggcggcgcggaagctcacccccctgctggtgcgcattccgggcctgaagacaaaaagggaacgcctcagcgtggaaaccatgatcacgcgcgtggagggaatcaagaaccacgccatcatctgcggctacggccccgtaggcaggaggctgcatgaaagcctgtcccagtacggcatcccctgcatcatcatcgacctgaacgcggacaccgtcaagaccctgctcaatgacggccatctggccttcctgggggacatccagcaccagatcaccatggacctggcgggaatccgcaccgcgcggctgatcgccttcacgttcccggaccccgccccggccctgtccacctacatgcagatcaagggagccaacgcgaacatcacggtgatagcccgcgccaaattccgttcggaagtggcttccctgcatcatgcgggcatcgccaacgtcatccatgatgaaatggaaacgggcgccgccgcggtgcgcctggcgaagctgagctttgatattattgaacccgcagacgcgcccacgctgtcccattaaacaatgacgaatcttccggacgcccacacccaccccgctcctgccgcacccggcacggcgccgcgcttcatctgcggcacctccccggcggactgggagcaggtggcccttctggcggaacgggataaaaacgtcacgcctttcttcggcattcatccctggcgcctgaacccggctgcatggaaggaggaaatgcgcctgctggaatccttcctgaaaaaattcccccgtgcgggcattggggaaacggggctggacaagtgccgccgcggcattccggggctgcccctacagcgggaagcgctgaaacagcacctggagctggccgcgcgcctgaaccgccccgccgccctgcactgctgccgcgcgtggggcacgctggcaggaatgctgaaggaatatccccggctgaaagccgtgctgcacggctggacgggtgccctgaaccccggcgcgcagctcccttccggcaactggcttctctccgtggggcctcgtgaaatggatcgcccgggcctcctttcctccatcccgctccatcggctggcgctggaatcggacgaacacccggaggccttgccggagctttaccggaacgccgcgcaagccctctccatgaaagaggaagaactggccgccctggttgcggacaatatggagaggatctccgcccgctagccgccggaaggcgcaacgccctcccggaacgcgggtggcaggaaacagcggcttttttccttggcaggctcctgccgccggctatcatgcgggcatgggcctttttcaggatcaaaccagttctctgtcggaaatcaagcggcttgccgccctcgtcatggatccctcgcgcagggatgaaatcggtccggaccagtggcccctggccatgatcgcctatgggctggtcacctgcaatgaaatgggcagggaagaagaaggcgtcaccatttacaacatcttccagtcctgctgcgcaccggacgcgcggcgcaaatgcgcgctgcaactggccaccttcatccgccagcgcaagggggacggatggcgggccctcctgcccttcgccatgacggatgaggccccggacatccgccggcaggcctccttcctgatttacacgctggcctcccccaaaccggaggaacgctttcccgggatcgccgggctggcggacatcatctgtgcgaatccgctacccggccaggcgagcatggccccggcgctggatgccctgatgagcctgggcgacatgcggtttgccccttatctggcctccatctccaaaaaacttccttccgaacgcctcgcggacctgctggccggaacggaagccattcctacggacctgggctgcggatggctgctggatgttctggacgaacgtccggagctttcctccgccattgcagcggtactgggcggaatgccgtccagggccggagaagtcctggatgtggtggtgcccatcccctcctggcaattcaccaactccgccgttcagccgctccattcctggagcattcccgaataccggctgcgcatgagggaacggctttccaggcgccttggaccggaagaacaggaagccgttgaccgggcatggagctgattctccgcgccctgcggaccagggcccacttcgtttataaattaaaagagccgttccacggaaatgaggaacggctcttttaatgttcagaaaaaccaagctcaggcgcgtttgcggcgcaccaggagcgccgtcagcccgagaagccccagcgtagcggtggccggttccgggatggacaagggcatgccgtgcgtatccaggtaggcaaaatcgtttccgttcaacacgccgtcgtacacagccaggttatcgacgaaaaggccgttggccccaggattgtgatccccgctccccttgatgctggtaaccttggaatcaccggaaagactcgtcgtgaccgttttgacaagctcgccatcgtggtaaacctgcatctcatttcccttgaacgtcagtccaaggtagttccatgtatcatcagaagcagcaaacaactcggttccgtccggaattccgatattccccccgttgtaaatcacccatttattggcggccgtcatctccaccctgatcgtcgtgcccgctatcgtcatggaaaaagcatccttccagtcagcactggaagaactgtaatacatgtggatgcccacgctgaagccggtggcaaaattcaggccgtcaatgccattggtgctggtgatgttgaacgttcctccgttgggacagtgggaataaccgccgtccgtcatgggtgtaatactattactccaattgatgtacccggtcgtttttgaaatggcagtggaaccgcttcccagattgatgaaattctgattgctcccaagctggttgaaatccagtccgtacaacagggaagaagcctgtacgccggaaatgaggcataaggctgccgccactgccgttcccttgaaagttaaatggccatggggattgaacatgcgtccactgaaacggataacaaatccggtgtcaagcgtgtatttttgataagtaaagatttatatttctcttttaatagagcggcggcctttcttaaaaccgcttctttaagaaaaagaacaggcggttccttgttctatttcaatttatttcatcatttactgcttgtttttttcaaataccggatttgttatccgttggcaaatcattccccatcatactcaatcctcccggcattttgaacgcacggaaacgatgtgacaggatcaggaaataaaaaccaatacgctaaaacggaaaggaagaagacgccggattcaacagctctttttctggcggccccttttcccggaaatgcgcctacctcgccaccacgtgattgtggtggaaatcaacaaagctccggtacgtttcctcgtccagcaaggtttcatgcgtcatcagcaggagggggaaaggcttcccttcatccgtataagggggatgaatgtaatcaaactggggattgggcacaaagccgtgccgctggtaaaaccccaggcggcggcgtgaaatcccgtcctccggaggatcaatctccagaataaccttgtggggaaaagcgtccctcaattcttccagaatcctttggccggcgccctgtccgcgcagggaggcatccacggcgaaatattccagatacacgaatgcctcacgctgccagctcaccagcatggcaaccacccggccttccccgtttaaaaatacctcataacaaaagcccgggtcttgaaacgccagcggaaaatcctggacgcgccgctgttcgtgcaccggaaaacttgtccggtaaatatccagggaatccaggaatagaggatcatccactcccgtcgcacggtgcttggtcagcgattcaggcttcatgccccatatccaaccacacccgtcttccttcggcaaggctcccggaaaaacttccccagtcatgcaacaacgcggccagacttaacccattcaccttccagacgattcactacttttctaacatattatataaaccgttgacaataaacaaaataagaagatatagtgataagagtgcagaaatagttcatccatcctccatgtttacaccgattctccgccttttatttcttctgctgttcctgatatttccgggaggcgccaatacggttcttcatgcggaagaaactccagacatggacgactgctccctgtatattgaatcaaagacggatgtggcgtccgcccaatgcatgattgacggaggaaaccaggaggacgacaaaaaacggactgatgtgggtattggagaagaagttgaactgaccttgaccgggaagcggttaaaagaggtggatttggattccatagaatggaccatggaaccggataatctggccactgttgaaaaatcggaggatggagataatcaggcaattctaaccatcaacaaggatattactgaaaacaagattcttacaatccgagtcaaaacaaatctcgacgaagagctgccggagagaaaacctctgattcttcatatttttattccatctgaaatcatggcagtacatacggggaaacgaatgcccaagtgtgcagcagatggagaaaaagaccatgcgggagcatccaccgtcctggatttaaccctgcatccattaaaagtgagtttcagtaatatcgccttcattgaacgggcgaatgatccggaaggattcaaaccggaacatgatcccggcgccgttttgttccgccccaacgccaaaaacaaggcaattcccagtgactatatcggatggaagtttaaacccggaattcgattgccccaattgcaggcttccaatcttcccaagcccttttcatgggcatgcggctggcatgtccgttccgatgacaaggactgccttctgattcatggcaaaccctatccccaggattttaatttcacttatgacggagaagaaaccgatgagaattctccaaccaaaggattacaaaacgtcaaagtaaccgtctccaaattccgccgcaccgtgacacgcagtacgacaggcaaagcgcttcataccaactcataaataatccttttccatatcattccatgaaccctgtttatgtacctattctcctggcttggacggccctccttttgttccattctcccgctttctccgatatccgcctgcccattccctcagccaccaggaatcttaacaagcagaacacgaaactgctccaacttaaaagactgctcgacgaggacagcatcattcccttctatcaggaagccgacaaaatgctgaaggaggccagcctttacagaaaaaaaaatgtcactccacaggaattgaccgacggcctcttcctgtgccgcctgattgcgaccgcgccattcatcgacgttaaccggcacagcaacgtcatgtggctgatgaaccacactaacctggactataaagttaaagatttcatgtcccggagcatgccgctagccgccttaacggacaagcattccaccttgccggaaaaggaggaagcgctgcggttttttctaacagcgagagcactggttctccagcaattccggagcagtttcaatcacgcctttgaggccacctggatctgttcggaaatgcttctggaccatgccccccagctcaccggcgaccgggaagcagccggcgaattcgccaacaggctcgcgaccaacgaggcaagaaacaataaacttaagaacatcatacccagaagggaaagaatattcgtccgcgaattaatgcagtgcttcccgaccaaagcggtggaagtcaaaaaatacctccgcatggccggctacggcgacaaggatatccccgccctgcttgacagaaccgtcggcaggattcctgaagcccggtacctgtacaagggtttgccgaaacggaaggattgaacgcttccccttcatctccattcaattcacgttttacctgatgcataaagagaagtggcgcgcttcatgaaatccatttgaagtttcattccggaaacattagaattcagctaaagccatgatgccgcccatgaaaattttcccgctgctgtttttcacctgggcagcttttccatgcaccctccaggcgcaggaaaaaccgcaaggggaaagcccctggccgcgctgtgcccctgcacgttccgggagccatattcttttcctgggaaacagctatacgtttttcaaccgcatgcccgccatggtcaaggccatggctgacaccaaaggactgcggccggacgtgcacatgcacgcggctccggcagcctccttccagtcccactggaatgacgggcgcgcccgtgaaaagctggaaggaacggcctgggacttcgtcattctccaggaccagagcgccactcccgtcgtggccccggagcggaccatggaattcggcggcaaatggtgctcccaggtacgcgccgcccagggaacgcccgtcctgatgctgacgtggggaagaaaggacgcctccggcgttccggacccgcaggagcaaaaagccctcctcgccacgtatttgaatctcgcccggaaggaaaaagccgccgtggcccctgtgggaattgcctgggaaaactgcctcaaacgccatcccggaattgccctgtaccaggcggacggccagcacccaacggaggcgggaagctacctggcggcctgcgtgatgtactgcaccctgttcggaaagtctccgctgggcctcccggccaaactgtccctgaaaggagtgcggctgtgcagccttcccgcagacagggccaaaatactgcaaaccgtcgccagggatacgtgcaaacagctcttttcctcttctgccggaagccgccccggaaccgccggaccatagaccgccgctctgctgccgcatagcgcaaaatctactcgcaaaacgggcgccgttcctttaaccttgcggcgatcacttacacatattatgagcgaacaagtcattatcatcggcgcaggctgcgcaggctacacggcggccatttacaccgcccgcgccaatctctctccgcttctcattacgggctcccagatcggcggacagctgaccaccaccacggaggtggaaaatttcccgggctttccggacggcgtgatggggccggacctgatgttcctgatgcagcagcaggcggaaaagttcggcacccggtttgcgtatgaggacgtcaagagcgtcatcagggatgaagccaccgggctgttcaccgtgaagaccagcggccagaattacgaagcccgcagcatcatcgtggctacgggagcttccgcccgctacctgggcattccgggagaggaagggctggtaggccacggcctcaccgcctgcgctacctgtgacggagccttttaccgggacgtgcccgtgtgcgtggtgggcggcggagacagcgcctgtgaagaagccatgttcctgacgcgcttcgcctccagagtgtacctgatccaccgccgcgacacgctccgcgcctccaaaatcatggcggagcgcacgctgtccaatgaaaagattttccccatgtggaattccaccatcgtgagctacaagacggacgacaagggagaactggaagccgtcatgctgaaggacctggtggaaggggatgtaacggaactgccggtcaagtgcgtcttcatggcaatcggccacacgccgaacacgtctttcctgggggatctggtagaccgggacgacgccggctacatcatccgggaacccggcctgatggcgaccaagacgccgggcctgttcgccgccggagacgtggcggaccctcactaccgccaggccatttcctccgccggcatgggctgcggcgccgccattgaagcggaacgctacctgctggggctgtaagcccatcttccggaacggggcggagtttccgcgggaaattccgccccgccccgctacaggaaaacggacatgcaccattacagcatttttgagcttttcagcatcgggataggcccatcctcctcccataccgtaggccccatgcgggcggcgcaccgttttctggaacagatacgccattccccccggctgccggaaattacgggcatccgctgtgaatgctacggctccctggcggccaccggccacgggcacggcacggacacggccatcatgctgggcctgctgggggaagagccccacacggtggagccgcgcagcattcccggaaaaatcgcccgcctgcaccagcaggaaacgctacctgtcacggaggaaaaaaccgtccgtttctcccccacccgcgacctggacctttcccactaccagcctctgcgcctgcacccgaacgggatgctgttcaccgcagtcaaccaggagggagaaccggtggaagacgccgtgttttattccacggggggcggcttcgtcgcttccgagcaggagcttctgcatccggaggaaccggaccgggagccgttccccctcccctatgaatccgcggaagaactgctgcgcatggcggatgaacgggaatgccccctctcctccatcgtcatggccaatgaatgcgccctgcttccggaacgggaagtccgtgaaaagttgaacctgatctgggccaccatgaagcagtccatttccagcggcatgagcgcgcgcggcaacctgccgggcgtcctgcaagtgccccgccgcgccaagacgctccgcaaatcccttctggtgcatggagaatcggccctgaaagaccctctctccatcatggactggatcaacctgtacgccattgccgtgagtgaggaaaacgcggccggcggccgcatcgtcaccgcccccaccaacggagcggcggggattgttccggcggttctcaactacgccaccaaattctgcgtttcaccgtatccggacgccgtgcatcgcttcctgctcaccgcgggtggcatcgccatcctgtacaagaaaaacgcctccatctccggcgcggacgtcggctgccagggggaggtgggcgtggcctgctccatggccgcggccgcgcttgcggagtacctgggaggaacgccccaccaggtggaaaacgccgcggaaataggcatggaacacaatctgggcctcacctgcgacccgatcgctgggctcgtccagataccctgcattgaacgcaacgccatcgccgccatcaaggccatcaacgccgcccgcattgccctgggcggcacgggcgcccacttcgtccctctggacaaggtcatccgcaccatgctggacaccggaagggacatgcagtccaaatacaaggagactgcccagggcggcctggccgtgaacgtggtgaattgctaaagggaaacggaaatcatcccatgggattccatgtgcgtctgttccggtaaaaaacactccggcgggttgacagacacggggagcaaaggtagggtgcgggcatgttttcacgcctttttctcgctctggccctgctggcgggcggcacgggactgtcccatgccgtccacgtcgtcatgtgcggcggtcccgccctcagacaatgggaaggactgagaatacagcctgacaggcatgacaactggtgggccaactttgtaagggcctccaccatccgcatcgcccagatccagcagaaggacccctccgccagaatcacctggatcgtttaccgtccgggctatgcgacacggggaagggaggacggcaagccctatacccgctggattgccgacctggcttccaagtacaagatcaagctcgtctgggtggacagcgcggaccaggccatccgggcgctgaattcctccccgcgcttccgcggagacttcgtggaatccttctactacttcggccattccaactgttttgcgtggatgctggactacggcaacaacatcatggccgtctccacggaatggattcacgaaacagacctgaaccgcatccgccgggacattttcaccccgcggtccgactgctggagcttcggctgctacacgggggccagcatgtccggctggtggaagcgcatcgtgggcgttcccctctggggcaacacggaatccacccgctacggccctgtctccgacggcaggctgccggaaggcgtgggcaaatgggttaaataggcatgtaatagttaacagtgaatagttaatattgtttataccttgcatattgacctgcgctgttcatctgttgccgatcccgtattgcctttccgggaaaaaacctttatcatcatacccatgcggaccgaattccgccattttctgacacaaccatgaaccaagcaccccatgttgccatcgtcggcgccaccggagcggtgggcgttgagatcctgtcctgcctggaaacacgcaactttcccgtaggctccctgaagcttctggcctccgcccggtccgccggaaaacaggtcgccttccggggagaaatgctgactgtggaagaattgacggaaaaatcctttgacggcgtggacatcgccctgttcagcgcaggcggcggcatttccctgaagttcgcccccattgccgcggccgcgggctgcgtggtcatcgacaattcctccgccttccgccaggacccggacgtgcccctggtggtgccggaaatcaacccggaagcggccctcaaccacccccgcaacatcatcgccaaccctaactgcaccaccatcattacgctgatggccctcttccccctgcaccagcgcttcgggctgaaaaccgtcatcgcctccagctaccaggcggtttccggaagcgggcagcacggcattgcggaactggaatcccaggtgcgcgccgtggtggacggccatcccgtggtgaaaaacgtttatccgcaccagatcgccttcaaccttcttccccagatcgactccttcacggaaagcggctacacgaaagaagagcttaaaatgctcaatgaaggccgcaaaatcctttcccttcccgacctcaaggtgacgtgcacctgcgtgcgcgtgcccgtgtaccgctcccattccatttccgtgactgcccagtttgagcagcccgtggatgtggaaacggcccggcgcgcctatgacggaaaacccggagtcgccgtgatggacaatccctcggaaggcgtgtggcccaccccgctggacagcaccaacggggacacctgctacgtggggcgcatgcgcatggacatggcgatcgacaatgccctgaccctctgggtcgtgggcgaccaggtccggaaaggggcagccctgaacgccgtacagattgcggaacttctggtcggccgctgaattatatctactatccccgcacccattccttaacgtcatgtgtgaagaacaatccctgaacgactacattacagaacagtgcgccttgattgacgccgcgctggacaggcttctgcccgcagaggacgaaagtcctgaaaccatccacaaggccatgcgctacagcatgttcgcgggcggcaagagaatgcgccccgtgctctgcctggcggccgcggaagcctgcggcggtctggcggtgaacgccctggtgcccgcctgcgccgtggaaatgatgcacacgtattcccttattcatgacgacctgccggccatggacaatgacgacctgcgccgcggcaagcccaccagccacaaggccttcggggaaggggtagccattctggcgggagacgccctgctgacggaagcctttgccgtgatcgcccaggtggacgacacggaacgctacactgtccgggattacgtccgggaactggcggctaccggcggcagcacgatgctcatcggcggccagattctggacctggaaggggagcacaagcagctctccgaaccggaagtgcgcgccgtgtacgaagggaagacggcggccctgctgaccacggccctccgcttcggcgccatgtccgcgaacgccacggaagcccagttggaagccgtcacggacttcggctacaaccttggcctcgccttccaggtaattgatgacattctggacctgaccgcctccacggaaaagctcggcaagaccgccggcaaggacgtgaacgcccagaaatccacctgcccggccctgataggcatggacggagcccgttccgaagcgaaatgccgcacccaggcggccctggacgccctgatgatcttcccggaagaacgccgcacccgcctggtggaactggccaactatctcctcaaccgcgaatattaagccgcattttctttcatgcccgcagaaaccgtatccgacaacgtggaaaccctgatcaatctggcgctggccgaagacttcggccccggggatgtgacttccacatacttcgtcccggaacacctgaccgccagagccattctgacgccccggaaaaagggcgttctttccggcgtcaacgtggcggcggaagtcttccgcaaggtggacccctccctgaaggtggaagtctacctgcatgacggggaggccgtggcgcccggcgccgtggtgatgctcattgaagggtccgcccgctccatcctgggagcggaacgcaccgcgctcaacttcatccagcgcctttccggcgtagccacgctcaccaggaaatacgtgaaggccgtttcccacaccagcgcccgcatcctggacacccgcaagaccactcccggctaccgcctgctggaaaaggcagccgtggcccacggcggaggcaccaaccaccgcatgggcctttatgaccgcgccatggtgaaggacaaccacctgatgacggacggcaacacggaacacctccagcagtgcatcaacaggctgcgcgcggaaaagcccggcgtggaaatccagctggaagcggacaccctggaacaggtggaagccttcctcaagctggaaggagtggaccacatccttctggacaacatgacgccggagatgctgaagcaggccgtcgccatgcgcggcgaccgcgccacgcccctgatggaagccagcgggggcgtcaacctggacacggtggccgccattgcggaatccggcgtggacttcgtttccgtgggctacgtcacccactccgccccctccctggacctggggctggatttcagcgtggaataacacttacctttcaccctatcatggacctgtccaatttcagagaagaatacctcaagggccagcttcacagaaaagacctggcggaaaacccctttgaacaattccagacctggtttgaacaggccttgaaagcggacattccggaacccaacgccttttccctggctacggtgaacgcccacggcaggccctccctgcgtacggtgctgctcaaatactttgaccagacaggcttcgtctttttcaccaactacggcagccacaaggcccatgacattgaagaaaacccgcaggtctgcatgatgctgccatgggtgatgctggaacgccaggtcatcatttacgggaaggccgtcaaggtttcccgcgcggaatccctgaaatacttcctcacccgtcccaaggaatcccagctcggcgcgtgggtctctcagcaaagctccgtcatctccggaagaaaactgctggaaatgaagctgatggagctgaaaaacaaattctccaagggagaaatccccctgccctccttctggggcggctaccggatcattccggacacctttgaattctggcagggcggccccggccgcgttcacgaccgcttcatgtacaagctccaggaaaacggttcctggacgatcgaacgcctccagccatgattacccggcgagcaacagaccagggagttgctttcctggacgtggaaacaccgctctgtacagccaccctgtgcctgcaaggggcgcacctcacgtcatggaagccggaggggcaggaagaatgcctcttcctttcccccaatgcggtctttgcgcccggcaaagctatccgcggcggcattcccgtctgctggccctggttcggtccgcgaaagggcgaaccgtcccacggcgtggcgcgcacctcggaatggcgcctccatcaccaggagacggacaagcgggggaacgccctgctttccctggccttctatccggaagacgaatcctaccccgccgccatcctgcgcctggcgctgggccgcacgctggccatgaagctggaaaccaccgcccgcatgcagccctgcaagctcacggaagcctttcacaactactttgccgtcggcaacctgaccaaatgccgcgtacacgggctggacgacgtaccgttccgggaagaagcgccccagcccatgaagcacggagaacgcccgctggcccccctggggtgcctggaccgcgtttacgactgcccggcctgttccgggaaaatcgtgctggaagacttcgtgctgaaccgcgccatcaccgtggagcgggaccacgcctcttccgtcatcatctggaacccgggacagcagggagccggaaacatggcggatctgggcgcggaatcctggaacaaattcctgtgcgtggaaatgggcaatgccggttcccgctgcattcccctcgcctccggacaatcccacaccctgtgccagaaaatcacggtgggaccgctggaatagcaggcattccccctcccttccgcctccggatgaacggacggctggcaggaaaccccatgcgcggggaatgacctcccaggccgttccgtaccgcttccggacaggggagcatgaagaacggcagcctttccgtccttcccttcaaaaggtgaaattggactcctccggaacttttgttccctgaatcatccctccgtggagctctccggcaggattcggcttgcaaaaaccccccttttaaggtttggtagattccgagccttttggcgcgttccctaccaagatgcatacaaacccaccttccgatgttggcaatgccgcaaccttcattgcggaaatttacggtcaggatgtcttcaacatggagaccatgcgcaactacctgccccgtcccgtctacaagaaactgctggctaccatccgcaaggacgaaaagctggacccggacattgccaatgaagtggcccaggccatgatgacgtgggctctggaaaagggcgccagccattacacccactggttccagcccctcaacggaagcacggcggaaaagcatgactccttcgtggacgtggacccggaaggaaacctggaactcaaattctccggaaagagcctggttcagggcgagccggacgcctccagcttcccctccggcggcctccgcgccacctttgaagcccgcggctacactgcctgggatcccaccagccccgccttcatcaagcgcacggaaaacggcgccaccctctgcatccccaccgccttctgctcctataagggacaggcgctggacaaaaagactccccttctccgctccatgaccgccgtcacccgccaggccaggcgcctgctgtcctgcttcggcggcccgtccaacatccacgtcagcgccgatctgggcgcggagcaggaatacttcctggtggacaagcagctttacgccctgcgcccggacctgatgatgtgcggccgcaccctcttcggcaacgtcccccccaagcaccagcagatggaagaccactacttcggctccatcaaggaccgcgtgctggaattcatggtggacgtggacgaagccctctggaaacttggcattccggccaaaacgcgccacaatgaagttgcgcccggccagtttgaaattgcgcccatctttgaaagccagaacctggccgtggaccacaacatgctggtcatggaagtgctccgcaagaccgccaacaagcatgacatggtctgcctgctgcatgaaaagcccttctccggcatgaacggctccggcaagcacaacaactggtccctctccgcccccggttacggcagcctgctcaacccgggttccagcccgcaggaaaacgccatcttcctcaccctgctctgcgccacgatcaaggccgtggacgaacacgcggacctgctgcgcgcctccgtcgccaaatccggcaacgaacaccgcctgggcgcccatgaagcgcctccggccatcatctccatctttctgggggatctgctggatgaaatcattgagcaaattgaaaagggcggcacccaaaaggcgtgcacccagaaaaccatcaacatcggcgtggataccctgcccatgttccctctggacgcctccgacaggaaccgcaccagccccttcgccttcacgggcaataaattcgaattccgcgccgtaggctcctcccagacctgcgcctggcccatgacggtgctcaacaccatcgtggcggaaagcctggatgaaatctgcaccatcctggaacctgtcaaggacaagccggaggaattccatgccacgctgaacaagctgcttcagaacatcatcaagaagcacaagcgcatccttttcagcggagacggctacggagaagcctggattgaagaagcggaacgccgcaaactgcccaacgttcccggcaccattgaagccctggccgcgctggaaacgcccaaggccaaggccctctttgaaaaatacaaggtggtcagccccgtggagctccacgcccgccatgaaatccagacggaaatcttccacaaggaaatcagcattgaagcggaaaccgcccttctgatggtggaaaccctctacatccccgccgtgacggaacagctcacgcagctcaccaccgccatcgcccagatgaaagccgccggaatcaaggcgggcatgaaagccaccgcggaccgcgccaaccagatcggcacgctgctggaccttctccccacccaggtgcaggaactccgccgcgccgtggacaaagccgagacaaaggtcatccagacgggcatggacaatctgagaagcaccatcgacatgctggaaagcctgacggacgcagacctgtggcccgttcccacctatgcggaactgctctttctgtaaaacaaagggctccctccggaacagaaaataactggctatcaaccataaacatcacttattccagtaccttccccaagaaaaagggcaaattaatcgcctgacggattgacaaaacagccaaaatagttatcctttccgtccggttgtgcataggccgcttagacggacggcactgaatctagtaattcacaagaagcatctttcaacatcatgagcaagaggacttatcaaccatccaagcgttgccgcaagcgtcagttcggattccgtgcacgcatggctaccaagaacggagcagacatcattcgccgccgccgcgccaaaggccgcaagcgcctgcttcccaagggagccgaaatccagtacaagcgccataccatccagcacggccgttaattcagccgccaggacttggttaacgcctccttggaactttttcacgggccgacccgcgggagatgcgtcttactcgtcaacaaagcatgaccagggcattccaatttgcccgggtgcgcaacgagggaccatccgtagcaggtcggcttattgttttaagtgcagccccgctggaacatccggaggaaccctccaaattcggcatcatctgcacgaaaaaaatcggctgcgccgtcgtccgcaacaagctgcggagacgcgtacgggaaatcctgagggcgcacggagccccctttgaacacggcgtgcacctggtgtgcgtcctccgctggcgggccgtggaagccagctatgcagacctggagcgggactggcagaaagccgcccgcaagctcaaacttcaacttctttcccgggaacaagacaaagcatgatgaaatggctgctcattgccctggtacggggctaccaaaccttcatcagcgcccccctgcatgcgctggggggccccggcagcggctgccgctatactccctcctgttcccagtacttcatccaggccgtccgggtccatggagcctggcgcggctttcttcttggctcatggcgcattttaagatgcaacccgtggggcggttcagggtatgatcctgtgcctccggcccgcacgccgcattaaattacctttctctcccctccctctcaaccaacttcaatcaagctatatcacattatggatcgcacagcatggatcgtcataggcgtttgcgccgcccttctgggcctgaacatttacatgggcaacaataaaaaggaagagcccgtccccgccgccccggctcccgtccagcagacggccgccgctccggcaagcgtcccggctcccggagcacaggcgcccgccgctcccagcgccccggaacagccttccgtcaacaaggcccttgaagaagacaagaccagcccgatcacgctgacggccacgcaggaagcggacggcaagcaggaacccttcatcacgtacaccttcaaccgcatcggcggctccatcggcgccgttaccctccacaacgacattgtggactcccaaaaagtcgcggaccacaacatcaccatcaacgaagcccagcagaggggcattggcgagcttgtcttcaacatggacgccacccaggacccgtcctatgacaacaccgtgtacaaggaagtcagccgcacggcggactccgtcaccctggagggctatgatcccgcacggcagctcttcatctccaagacctacaccctgcaccccgtcaagaatctggaaggaaaagtactgcccggcagcaagtacctcatccgcctgaccgtctccctgctcaacaaatcctccaacgtccaggatctgcgctacatgggcatcttcggcggcagcgcctaccccatcgccaagagtgaaccgaaggacacctacacccacttcttctaccatgcggacggttccctggaacaggaagtgccctcctatttcacgggcggctttttcagcaccgcaaaggcccgcgtcctggaaggccccttgcaggacctgacctatgccggcgtgatgagccagtactacgccaccattcttcttccccagaacgagtccaagggctccaccgtgtacgccacccgccaggaattcccgctggcgcatgaaaacaacacactggtgcccggcgtcaccgtagccatgggcatccccaacctgaccatggcgcccaacgaaataaagacgctcacctacgacatctacaccggtcccaaattcaacgcctacctgcgcgacctgaacctcacctaccccgccatcagcgacatcatggcgtacggctggctcgtcttcctgagcgtgccgatgaactggctgctcaacctcttccacggatggttcggaaactggggcgtggccatcatctgcatgaccatcgtcgtccgcgcgctcatctggccgctgcacaagaaatcctacatggccatgaagcgcatgtccctggttcagccggagatggccaagcttaaggaaaaatatccggacgacccccagaaggtgaacatggagatgatgaagctgtaccagaaatacggcatcaaccctgccagcggctgcgtgcccatgctcatccagatccccatcttcttcgccttctaccgcgtgctccagtattccgcggagctgaggggccagcccttctgcctgtggatgacggacctgtccctgcccgacaccgtaggccacctgttcggcatcccgatcaacatcctgcctctcatcatggccgtgaccatgattgtccagatgcggatgaccccgcaggcgggcgaacgctcccagcgcatcatcatgaacctgatgcccctgatgttcttcctgttctgttataacttcgcttccgccctggccctgtactggaccacgcagaacctgatttccatcggccagacggccctcatccgccgcctgcccatgcccgtgctctccgccgccaaaaagaagaagcccggcttcttccagaggatgatggaccagcagcgcgtggccctggaggaacagcagcgcaaggccaagggccgcaacatgcgcaacataacgcccaagaagtaggggcgcgcctttactctctcttccctgcaagtgcggctgttcacacggccgcacttttttattggggcggatgatggaaagaaaatcccccctatgacaagcgctggaagaaaagggaaatttccatacggcagccccctcaaaaaaaccggacccctccactcggagaagcccggttttcctcgtcatatattctttgtgtagctaattggagcggcccggcagaaaatgccaaacacccaccagaatcaacttagcgaatttggaatccggtatggattccatagctggaaatactgcccttcgctatgctccaaaacggtccaaattgacgctccgccaatatttcttccatctcctattcacagccgcatatcgccccgggagacagggcatcccggtcctgatggaccgcctgtggagaggcccgggggctattggataagaagcttccgctgcgctacagaaagagtttcaacaacgaaaggagggagccttccgttcccaggcgccggaaccgcaaaaccgccctccatcaatattccaccgttccctttcacagccgcataccgtccgggagacagggtacccggccctgatggctaccgccgccgaagtgtaaagacggttattaatgattgccggaacgaaaagaaagcccgtcacatcaagaactccctatggcaattcccaggatattggcaagttcaatcccctgaaaacgtttttctttcagttttgtaggcttgactccggattccaaatccgtctgccgctctaaagcctgaaccccagcctgcggcacagccgcccccacaccccttctaaaaaaagagcccaaaaaaggaaatatggcagacgtcttcttacggcgcagtcaaatcttccggcatcagaatagccgccacggcaaaggcggcgatgccttcccggcggcccagggcgccgagctgttcattggtggtggctttcactcccacgcgcgccggggagatgcccagggcacttcccagggctcccttcatctgttccagatagggggagatgcgcggagcttccgcaatcagggaggaatccacattcaccacgcggccgccgcgctcacgaatcagggaaacggccttcgccacgatgtccagggaagaaatatctttgcagccagggtctcccggcgggaaccagtagccgatgtccggcaacccggccgcacccagcagcgcgtctgcaatggcgtggcacaaaacgtccgcatcggaatggccgtccagcccgcgggcggaaggaatgtgcacgccgcccagcatcaggggacgcggagcttccgcaaaacggtggatatcatatcccagcccggtcagtgcaatcatgtctttcatacaatactgcggcaatgtcgttcaagttattcgtccagagcttccatgatcggaatgcggccgttccaggcgacgatggcgaattgttccggattgtcctccttcggttccaggacaaccttccctcccgcagcttccaccagcagaaccccggcggcgatgtcccagatggaaatgacgctttccacataggcgtcaaacctgccgcaggcaatatacgccagagccagggccgcggaaccgttgttgcgcaccttgcgtacctgccaggcgatttttgcgaagcgttcgattcctttttccttggaaccgtccgtcttgccgtgtcccacgaacaccacggcctccgccatcttttcccggcggctgcaatgcatgggatggtcattcatgtacggaatgcctcccttttccacatgccagcattcgtccatcatgggatcataaatcacgcccagcactatttccccgcggcggcgcagggcgatggagacgcagaaccagggaatggtgtaaaagtagttcaccgtcccgtcaatagggtccacaatccattcatattcactgttgcggtctccggtatacccttcctcgcccaaaacggcgtgggcggggaacacggagaggatttcctccgtaatcagtttctgggagagcttgtccagctccagcttgatgtcgttctggctggcttcatccaccttcttctggtcgtaaaaatgctttttcaggaaggctccggcggatttggcggccaggatggccgcggtcatttcaggtgagtggttcatgatattctattaatggaaaattggatgccatcaggtgtcctgctccgcaggagcttccttctcccggcgctcccggacggctttgcgacggttttcctccgcccggtcatacacttccccggccagcgcggcggaggtcttcgccagtgcggaggcaacgcccttctttttatagacggcttcatccggctcgtcgaagcccacccagacaaagaccgtgaaataacgccccatgacggcggagaaatgccccgtgttttccggcagcctgacattgacggacgtcttcctggagcgttcgtcgtaacggaagggaggaagggccgctaccaggtgggcggattcccgcggcaggatttcccggcggctttcttccggagagggagcgttcaccatcaccagatttttcttggtggtgcccacctgcctgacggaggaaatctgcacgttgcgcccgtcgttgccgatgaggtacagcgcattgacggcatgcgagagaggcgcgcggaacctgccggcatacaaatccggggaacgcggaaggtcccccttgtacccggccttctgcgccgtttctatcaccgtattgaaccctaccccgcgcccggtcacttcaggactgctgcgaataacagtcctgcgctggtccacggcgcacaggttgacgacgggagtaaacaggtcgccgggcatcaccatcgtctgccaccggtccacgccgtccagcgcagagcgcccccccgtcacggccagcaggtcccctttgcgggaatccacgcacagcacggctgcctgcacgcaattcttcaactggttgtccactctcctgggcagtccggcccacacgggggaagcttccagcgcggtcagcgcaggctcgcttatttcctccaccatccgctggaattccaaatccagcgtagtcattacaaaaatgctggaagttccctcctgctcgtcgcagcagtccaggtcactcagctcacgggaaatgaccaggatgggataggagccgggacgcgcttcccgttctcccgccaccgtcatcggttcgcgggacgcctgccatagttgttcctgggtgatgaattcgcactcaaacatcctttccagcgtcgcgttgcgcaccttgacggccgcctccggactgtaaaccgggttgtaaatggaaggtccgcgcaccagcccggccagcgtggcgcattccgccagcgtcaggtccgccacttttttgccgaagtacaaatccgccgcctgcacaatgccgtagcactgctgtccgaagtagatgcggttcaggtaggccgtcagaatttcatccttggagtatttgccttctatgcggcgcgccacggccatttccagaaccttgcggtccagggtcttcccccccagttcatagcaattccgcgccagctgcatcgtgatggtggaagccccctgcgcataggacagcgtggtcaggttccggcaaatggagcggatgatggaggaatacacgattcctccgtgatcgaaaaaggcttcgtcctcccgggcaatgaaggcattcaccaggttgtcaggcagttcattgcgggccacatacacccggtcgtggtccgtcagggtgcctatccactggccgttgcggtcatacgcggcgcaattttccaggggggccagcacctcgtccagttcatactggtccgccctccaggcgtaaacgagcaggacgatgatgaaggcaataggaatgaggcccagccacagcagcagacggcccagattgcgcggcagcaatccgaacagatcataccatcttttacgcctgttctccattccggttccgatccttggggacgcctagcgggcatccgggggcagtgattcgtcatcctgcttccaatccgggaactccttctgcaggcgcgcccggtactgggaagcctccgacttgcggccagccttgtccagcgcttccgccgccttgaacagggccttgggtttcaattcggcgtcattgacgaacaactcggccgtgacgccgtaatacttggctgcttcatcaaactttttctccgcataggaaatgtcccccagaacaattttcagggaggccatcagggggccttccactcccagggccagcgcttcctccgccgtcttccgggcgtccgcgtacttgcccagccccagcaggatggaggccttgtccagcatgccgtccgcacggcggtagggctggtcctcatccttcaggaagttgttggaagccaccagggcgcggtcatacttcttgagcgccaggcgcaccttcgccaggttgcgccagatcaccttcttcacattttgaagctggtcgttctgcgtagcccaggtcatgtacttgtccgccgtttccaggtccttcatgccataggcctgaaggcccagccatgcggggatgacgtccggcacgcgggccacggcggaggggttttccttttgcagggtttccagggcctccttcaatttattcacgtcctggagcttgtgataggacagaacggaaagcacattgacctgttccccgtacttctgggggtccagcgtcttggcttccgccatgtggctgatggaggacttgaagtctccctggtcaaacgccgcacgccccagcaggaaatgagcttccgccagagcggcgggggacgccttcgggaaattctgaatcaggccttcataatacttggccatgttcaccatatcctggcggcccgcataaatctgggcggcccgctgccacgcggcggcggcggattccgccttcggccagcgagcgatcacccggtcaaaatccatcagggcctccgcttccttcttggtcttggcgtacatgtccccgcgcagggtcagcgcctcgcaaatgcgcgggtcccgcgggaaatcgttgatgaaatccgtcagcagtttggcggccacgccccggttcccggcctgggcgatcgcccacgcgctcttgtacaggatatccgcgcgcatcctggggggcaccttgtcaaaatcaatgctggcgtaaaaccgggcggcatccgccggattggtgttgaacaggttctccgcggccatcaggcgcaccatgtcgtgcagttcgctggtcggaaaggccttggcgtaatggttcagaaagctctgtgcccgctggggaaggtccttctgcttgagttcattatagcacagcagacggtaaaaggaggcctgcatggcttcctgcgtatagggaacggccttttccgcctccaggaagaaatccgccgccttctggtactccttcagcttgtaggcagactggcccagaagcatcagcaggcgcacctggccgtccttggtcggcatcttcatgtccttctgctgctcgtgctgggaaaggatctccttgtacttgcccatgttgtacagccccagcagcagccccatgcgggcttccggcgccatttccttcagggattcgtccttcaaaagccgttcataaaggttctgggcctccgcggtctttttcagcctggttgccagcatggcggcctgaagggtggcgatgccccggttcctgtcatccacgcctggcgtttccagcaccttgcggtattcggaataggcttcacccagacggcccgtatccgcacacagggcggcataccccatccgggacaccaaaacaaatttcgcatccgcttccggattgcctatcaccgcgcagaacatggtggcggcggcgtccggattcccgctggcaagaaacagacgtcccaggcggtactgggcgtccactttcaaatcattctgttccgcattgcggaccacgagctggtaatactggatagccttgtccgtttccccggcagcggaggcatccgtcgccaggcggtaggcggaagcggcaaccagagccgggccgcccgtctgggtcagcctgcggaacagggtgtgcgcgtcctccttcctgccgagctcctccaggcacatggcggcgcggtactccgccaggggagcctgggcggactgggggaaacgctgggcaaattcaagatacttgcgcaggctcaaatcaagcaggcggccatattcctgccggttcgccttcgtcgccggttcctgggcctgcttgtacagcatgtccgccatgtccagggaatcctgctccggattggcgaccagcggaccgtccgcaatgggagcggcgtccggaatgttttcctgcgcggcggcgaacgccgccaaagtcattaaacctgcattgatgaaaaataatgctttcatgaagcctgggggttgggaacattgacggaagagggagccggaggccgcgtggagaaggaaacattgttcagcccggccttcaggcaggcgtccatcacatgcaccaccacgccggattccgccttctcatccacgcggatgcggacgagcatggttttatccagccgggcgacggaaagaagcttgtcctccagctgcggcatggtatacgcctggcggttgatcaccacggtgccgtccttccggatattcacgatgatttcattggaaacgttttcaccgggcttgggagtctccgcggaggggaggttgatggaaaggtccggctcgtcatcctcaaacgtctgggtcacgatgaaaaacaccagcagcagaaacacgatgtccagcatgggcgcgagctggaacccgatggggctgggcattttatagtggaatttcatacgttcttccggtgtggtggggatggccgcttccggctaaagcccgcgcacgtcgcgcagggaggtggggtcaacgggaaccctgggaagttcttcctcatggaaggctccggctacgccggcacgcggcttctggagctgggtggctactacggaaacgctgtgcgtcacggcggcttccaggtcccccacgcgcttgtgaacgcggctgcggaagtacacataggccaggatggcggggatccccagcatcaggccgcccgcggtcgtaatcagggcttccgccacgccgcccgccatgtcgatgcgctgcttgccgccggagaaatcaccgttggcgatctcaaaaaaggtcttcatcatcccgactacggttcccagcaggcccagcatgggagccagggcgccgatgtccgacagccaggaaatctggcgactcaggaagcccgcctggcggccgccttccgcggcggctatttccctcacctcttcaaactgggcggaaggattgcgcagcatgaaactggccaccgtcagcattacgcgcgcgtagcaggagtccccatccttgcaaaggatggaaaggcccgtataatccctcttgcggatgaaggattccgcctgctccaccagcttggtgggcagaacggcggaggcgcgggtggaaaaacagcacatgaccagcaccaccaccccggcgatggataacaggagcagcggccacatgatgaagccgcctttcataaacagctcggagaggggatagtttctatctcccaccacaaagtccatggcggcagccagcgtggtaaacggtacaggattcatacaaaagacgtaggggattatacagaagaagtcttcctaggcaagccaagtagccgtaatgcagtacgtttccgcagtttcatttcttgccgcatatggcataataatccccgtggcagatcgtgagaaaccatctctgaaggaactctggaggcaaactccgcataaacccggcgtttacatcatgaaagacgccctggggaataccatttacgtgggcaaggccaaggacctccaccgccgcctgggcaactacttttcccccacgggggccaccctgtccaaccacaagacaagggcgctcatcaatgccattgcgtcattcgactactttgaaaccaggaacgaccaggaggcttttctgctggaaagcaagctcatcaagcagtaccgcccgcattacaacatccagatgaaggatgacaagcgctatcccctgctgaagattcccaagggggaaaaactgccgcgcttccagctggcgcgggtgcgcaaggacgacggagcgcgctacttcggcccctttgtccactcccaggcgctttacgccacgcaggaatggctgaaccggcatttccggctgcggacctgcaaggccaaaaatccgggtctccacgagttcaagcactgccatgcggacgtgatacgcaactgctccgccccgtgcatcgggcgcatttccgtgagcgactataaccggaacttcgaccaggcggcgcgcctgctggaaggaaccggcaaaaaaagcactctggacgagctcacccgggaaatgatgcaggcctccgacgagctggacttcgagcgcgcagcgtacctgcgggacatccgggacaacctggtcaaggttctggagcccgcgcggcggttccagaagggaacgcccaacctgcccggcaccgtgcgcccggaagaagacatgaaggaactggggctggccctgggcctggaagagcctccagccatcatggaatgttttgatatttccaacgtctcctccaaccacatcgtggcctccatggtgcgcttcaccaacggcaaaccggacaacaaggcctaccgccgctaccgcatccgcacggtggacgggcagaacgacttcgcctccatgtctgaagtgatccggaggcgctactcccgcattctggcggagagcgacgccgtggcctcacggcccgcggacatgaccctgtaccagtggctcaagaagctcagcggagaaggaaaagcccccatcaaggttccggacctggtggtggtggacggcggcaaaggccagctctcctccgccctggccgatctggaagccatcggactgggtgacatgcccatcgtcggcctcgccaagcagcgggaggaaatcttcttcccccaccagccacagcccctctgcctgccgcacagcacgggagccctcaagctcatgcagcgcatccgcgacgaagcccaccgcttcgccaacggctataacgaactgctttaccggaagcgcatgcgggaaagcgccctggacgacgccccaggcatgagcgcggcaaaaaaaagcatgctgctggaaaaattcaagtccgtggccgccatcaaaagggcggacccggcttccatcgccgccatccgcggcatttcggaaacctgggcccgcaacctgctgaactacctcaattcatcctccaactcctgacttctcatgcaattcctgattctggccgcaggcaagccggccctgggctatgcccgggaaggcgtggaactctacctcaaccgcctcaagcctttcggcaagacggaactcaaactcgtcaaagacggaagctccaaagacgtttcagaacgcctgctggccgccagcgagggctgcctgcgcatcgccatggacgaacgcggagaactctggaccacggagaagctggtcaaactggcgcgggactggcagatgcgttccgtgcgccgcatcgcgttcctcatcggggcctcggacggccacacggaagaactgcgttcccggtgcggccatatcctggccctgagcaaattcaccctccagcatgagctggcgctcgtcgtcctgctggaacagctttaccgctgccataccattctggcgggaacgccgtaccaccggtaaacggctaaagctttccttgctgccgcggtgagtccatcaaggctttcaccgtcacggaaacggtcgcgagcacggccacaccccatgccatggagtcgcccgcaattcccgtggcaaacgccggaaaaggattgaacgccaccgcaagggaaccaaacacccagccccagccgggaaagcctttcttaaaggccacgtaagccagatagaaatacaaggccacgcctgcaaattgaaacaaagggaaagcgggaccgtattccaccttcctgaggccggagacattccccggcatgcgatgggaatgtttcagaaaagaggctatcaccagaaaaagcggcgcaagcagtaaaggagcaatagggaaaacgcttctttccgttttttcttcttccggagaagaatccggaattccgtcctgctgccgaccttcttccataataattaatcgtaacagcaaccagcttcccctgcaacgaaaaaggagtactccgcagggagcactccttttccgagaaagaaatggtaaagccagttccttcgcagccagccaagcttagcgcttggagaactggtaacgcttgcgggcgccgggacgaccgggctttttacgttccttcatgcgggaatcacgggtcagaagaccgaattcacgcagctgggcgcgggaagcttcatcaacctgaaccagagcgcgggcaatcgccatgcggatggcgcccacctggccgtgaatgccgccgcccttggtgacgacgttcacgtcgaatttgttcatggtgttggtaacctggaagggctggagaacggcgttctgcaactggacggtgggaaggtattcttcaaaaccgcgacgattgatcgtgatgcggccggcaccttcagtaagccaagcgtgtgcaatggcggtcttgcggcggccggtggcgttgtatggggttgtctgactcatgtctggggaaatcaattagagagtgatggcagtgggctgctgggcttcatgcggatgaccggcgccggcataaaccttcagcttggtcatttgctgacggcccaggcgggtgtggggcaccatgcccttgacggccagttccagaagaagttcggggcggcgggcgcggattttccgcggagtgtccacctgcttgccgccgacgtatccggagaaacgggtgtaaatcttggcgttttccttgttgccggtcagcaccaccttgtccgcgttcacgataatgacaaagtcgccacaatcaacgtggggggtgaaaattgtcttgttcttgccacgcaaaatgttagccgcttcaacggcaacacggccgagcaccttgtcggcagcgtctataacataccatttgcgctctacttcttgcggtttggctgagaaggtcttcatggttcaattcttcgttctcgtttttcggcatcctgccgtaatcttccaattcgggggcgcattcctaatgattattcgcgtaaatgtcaaatactttttctcttttactccccttttgcggccttttttccgtcccttccgcagaatcgcggcttaattgcggcgtttccacattcaggacttgccctcgtggaaatatggcctattattcgcctgcgcgaaaattcgtacacgcgcgttcattttaaccttacaaggagaatcctatcagcccgaatccaagacccagcaaccgccccagcggcggtcagaattcccgccccggccccaggccggcaggcagcagcacaagaccggccggcaacgccagccgtcccggacagccccggcctgccgggagtggcaccggcccggcacgcccggccggacagtccgctggcccgggaggcgccagaactggcggaggaccacgccccggaggcggacccaaccggccgcgcccgcagggaggcgggggccgccacaccaagggcaggaggcatttcagcaaatcggcccccaaggaagaaaactccgaaagcgaaattgaagtggaaggcaccatctgcgccgtgctggcgggcaccatgttcaaggtgcgcctgcccaacgggcacgaagtgctggcccacatttccggcaagatgcgcaagcgcttcatcaaaatcgttgtgggcgacaaggtgcgcatggaaatgtccccctacgacatgaccaaggcgcgcatcacgttccgcatcggttaaccgcccccggattcactccttttgcgaaaaaccttctccggcttgcaggagaaggttttttaacgtacagtgcacactgaccccatcagcgcgccatgaaagtttgctccacggaaaatatgcagatcgcggaacgcgagctcatcatcaacggaactccggccagaaccctcatgaagctggcttccgccggcattgcggaagccgtcacgcagttctttcccgtccccgggttatgcatagcctacgtggggaaaggcaacaacggcggagacgccctcaccgtcctcaatatcctgaaacagcatggatgggaaacaggtttccgcgccgcctacccgcgcgcggaatggggggaactgcccgcgcggcagctcgcggaaatatctcctccgccccaggaataccaggaagcgccgctgccccgtacgggtaagcccatgattctgctggacggcctgctgggcattggagcaaaagggctgctccgcaaggaaatctccgccctctgcgcggaaatgaactacctgcgggaccgctgcggagccgtgcgcacggtggcgatcgaccttcccaccggagttgacccggatacggggatgccccaggaaaatgccgtagaggcggatttcacgatgtgcataggagcggtcaagcaggggctgctggatgacgacgccaccctgcatgcggggcgcctggcctgcatcgaccttcccggcctccatgtgcaggcgcttcccgccacggaactcatcacctcctcccggctcactaaattcctctctgcaagaccctatacggactataagaacaaacgcgggcacatcggcgtcattgccggatcggaaggaatgctgggcgctgccaggctctgctgtgaagccgccctccgggccggagccggactggtgacgctccacgtccaccggaacgtctatcccctcatagcgccgtccatgccgccggaaatcatggtcaaacccgtggacagttatgcggacgtctccatccggacgttcagcgcctttctcattggccccggcatcggctccgtatcggaggaagacgcggaagccatccgcctcattctggaaaccggcactcccaccgtcctggatgcggacggccttaatctggccgccgccatgcaatggagcctgggagaacatattctggcgacaccccaccatggggaaatccgccgtctgctgccggacgcggacaactgcgccatccgggcggacatcgcagactgcttcctggcggagcatgaagcggccctgatttacaaaggggcccgcaccatcgtcacccagcggggaaaacctctcttctacaacatcaccggaggccccggcatggctaccgccggccagggagacgtgctggcaggcgtctgcggcggattcatggcccagggggaatccctgctggtctccgccgttctgggaacctatctctgcgggcgagcttctgaaatagccatctccgccggagattccacccagcagacactgacggcgggagacacgctgcgccatctgcccgccgccattctttccaccgcacgtctctgttactaaaatggcctaccgaaaactccaggatcttcccttccaatccctgccgcgggaaaagctgctccgccagggaaggcacagcctcagcaatgcggaactgctcgccatcttcctgcggatgggcatcaaaggaaaaaacgtgctggacatgtcctcggacctgatccagtcggcaggctctctggacgccctggcccacatggaggccgcagaaatagcggacatctgcaagggaataggcatggcgaaagcggccacgctgagcgccgcctttgaactgggggcgcgggctctccgggaaacgctggcccggcaacccatccagacgccggaagacgtctatgactacctggtaacagccatgcgctggaaagacaaggagacggtactcgtcctgctgctggataccaaaagccgcctcatcaaacccgtggaaatttccagcggcaccctgaacgaatccatcgcccatccgcgcgacattctgcgtcccgccgtcatccacaatgcctacggcttcgtcctggcgcacaaccatcccagcgggaacccggctcccagccgcccggacgacctcctgaccgaacgcgtgcgggaatgcgccaagctattgggcgtccggttcctggaccacgtgatcatcggaaaacctaccgaaactgttcgcagaaactattacagctataaccaccccaacggagaccggctccgggaagccgacaagggcctccctctctatcattaaacaaccgttcccgcgaattttcttccggaacgacgcctgataaaaacaaaaaacccgtcttgcgacgggctttctcttaaaaaaaactggcggagagagtgggattcgaacccacggtgggttttaaagcccacgttcgatttcgagtcgagtgccttagaccagctcagccatctctccgcttggaaatcgggagcgtttgtatccggtttgcgggatgctgtaaagaacagaatcaccgccaaccgttatttgaacgcctttaacgtcttggcgaagccagcggtcccagcgtagcttccgcttcaaatctctgggtcttgttatggggaagagcgctcttttccgggccggggggcggctgcggaacacgctcccgttccttcggctccatcagccaggagcaggaagagaccagaagaagggagaaagacgtaagcaaaagggaggctgtgaatcgtttcatcatttccttttaaaaagttgaaccccactatgccggagggcacagcggggttcaaggaaaatacgcggcagaaaccttatttggcggactgcaacggacgcagaagctgcaccatgtcgccgggctggatgctcatgccggcgggcacgctgtccttgacgatgtcagccaccgtctggttcttttccagggaggtcaccttcagtttgccgatgctgcggccgtcacgggtaacgagcagaaccgtattcggatcaatgttgctgccctgcccggcgccaatcaccacaaagccccactgcgggtccacggacagaacgggatattcatctccattcttggcgagggcggcgcggtattcggcctgttccttctggcgtccggccagctcggtagcctgctcggcacgcttcttggcggccacttccgtagcgctcttgatctggtcaatgtcttcctgaagcttcttgttggaggcttccatggattccatcttcgcctggatttcctgcacgctggaaacgccgaagtcgttcagcttggccttgagctcatccatctgcttgttgatcttggacaggtccgcattcagctggacttcttcttccttcagctccgtttccttggagagctgttcgtcacgctgctgggtcacggaggccttgttggaggtcaagctgaggttttcctccgcagccagaccgcggttcttgatcatgtcattgcgcaatcccgtccaattccggatttccttgtccagaaccttgcggtaggtgatcatctccttgaagtcctgatactggccgttgacgccgaagaggccgctgagaccggagaaccaggcgcccgcacctgctgcaagaatcaataaaactactaagacagttttcattgtgtatgtatgtgagagtgtatggtgtgtattgaaccgggaaaggactagggacgaacggatacaacgacgtctccggcttcaacacgttcgccggcggttaccgtgctggggagaatggtggccgtggaaacacgggattcaacagcgcttacgtcaagttcggcaattttgttgccgtccctcatcacggccagcttggagccgggcactacgcccaggtcggcagcaccgccgtcaatcacaactacattgaaatcattaatcacctgggaaacccgcgttttcagattgggcggggaaaggtgcgcatcctggtccgccttgagctggcgaagggccgcattgttcacgacaagctgttccgtttcagcaacgatggcgtcatgcttgccctgctccgcctgcttgactacttccagctgcttggattcttcttccagtcccttgatcttgtccgcaatggcctggatactttccatgtccttgctcttggactgaagttccgccagggctgtttgttgcgcctggaggtccgtcttcttggcctcattggcggcggccagctcctggttcttggcttccagctcgtccttctgcttggtcagggcgttgatatcgttcgtcaaagcctcattcttcaccaggaagtcgacatattttgtcttttcttccgtaaactcgccgcgaagaccgttcaggttcttataacgggagacgcattccttacgctccttggttagagcttcctcgttatcaagataatacatggctccgccgagaagagcaatgaccaaggctgctattgatactttgacccacataggaaataatagagatgagaaggttcctgttacttttgtgagattggcatgaacattttcagatttcaacatcaaaatgtcatcctcactgttttcttgatatttttttcagggaagctccgtaacaggataccgcaagagttctcttatcaacattttaaaacaattacgctctattttcttttcaaacacggactcatcttctagtctttctgaaccgtgagttaccaggtctttgccagaaaataccgtcctctgacattcgatgacgtccttggacaggatcatgtcgtccagacgttgaaaaacgccattgagcacaaccgcctcgcccacgcctacctttttgtaggcccccgcggaacgggaaaaacatctaccgccagaatttttgcaaaagccctgaattgcagcggcggtcccagggtggactttgacccgcacgaagacatctgcgaggaaatagcggaagggcgcagcctggacgtcctggaaatagacggcgcatccaaccgcggcatcgaccacatccgtgacctgagggacaacgtgcgattcgctcccagcaggggcaatttccgcatcgtctatatagatgaagtgcacatgctcaccaaggagtccttcaacgccctgctgaaaacgctggaggagccgcccccccacgtcaaattcatttttgcgactacggaaccccacaagattctgccgaccatcctgtcgcgctgccagcgcttcgacctgcgccccattccctctgaaatcattgcggaacacctgcttcacatcgcctctgcggaaggagtgagcctgagccgggaagcggcctttgccgtcgccaaggtggcggacggaggcatgcgggacgcgcaatccatgctggaccagcttgtttccttctgcggagaccacattgaagaacagcaggtgcttcacatcttcggcatcacgtcccgggaaaccgtagcccatgcgctggcgctgattctgaacaaggagctcccctccctcctgcacctcctgcatgaacaggcggaagctggaagagacatgggccagttcctctctgaaatcatctccgccgtgcgtgaaatcctggtctccaaggttgacccggaggccagcttcgattccctgccggaatcctccaaggaggaactttccgaactcgtcaaacgcacccagacggacaaaatcctgcgcctggtggaagtgctggcggaaacggaagacaagatgcgctggtccaccaacaaaaggctgcatctggaaatgggcctgatcaaggccgttcacgctctcgcggaagccagcatcagcgatattatcatggcgctggaaggcgcccccctggcatcctccgtcccatcctcctctccggcgcccgctccgcgccaggaacaggagatgcccgcgcccgccgctccggtccctgcgccggagcctccggcaaacgcccagccgccccttcctgcggaaaaaccggagcccgctccggaagaacacctgatggacccggttccggacttttccccggccaacccattcccggctcccgcggtacaggcgagcgaacctgccagtgcgcaaccagccccggctcccgcagaaaaacccgaaccgcagcccactgatcccgcgccggaacctcccgtaactgctgcaaaagccccctcccccgccattccgcaggaagagccttcctgttccgcacctgaaccgcggccggagcccacttccgacaccccggaagagcctcaacgtcccgcctctgccatctccgatgccccggtggctcctccggattctccggaacccactttcatggaccctgaggaaaacctcccgccggaaaggcgcaccagcagcttctttgacaacctgttcgacacggcaagcgctccttcccgcacccctgctcccatggtaaaagaggaaccggaagcccctgccccgcaatccggaagaaccatcacggaggaggactggaaagcggcgctggaacgtgccgccgccaacttccccctccaggcggactttctggccaacagcgttttctccggccatgacggcgcattcgtcgccatctcctttcatccctccgaccatcagggaatggacagcctcggatccggccccctgcgggcggccctggaagcggacctttcccaacgcggcggagtccccgtcaccatttccatccgccaggattcctccgtgccggagccggttcaggaagaactggccccgctgccggcgcctcccccccccgcggcctccgcaccttctcccaaaccccaggcgccgcgggaaaaacccgccgcagccgttcaggaacccgccagggagaaagatgaagataattcctactatacggaccccctgattgacgccgccatggagatcttccgcgcccgcatcatttcccaataaacaacatcaacccatacttccaaatacgacagccatgaacatgatgaaaatgatgaagcaggtccagcaaatgcaggccggacttgccgccgcccaggaaaagctggcctcccagaccgttgccacggaaggggcgggcggcaagctgaaagtcaccgccacctgtgacggaaacctcacggagctggtgattgatccctccatcatcgacccgtccgattcagaattcctccaggacctgctcctgcaaaccatcaatgccgccatagccaagggcaaggaaaccgcggcggcggaaatgaaaaaactgacgggcggcatgagcctccctcccggcatgggcctttaacctaccaccaccgtgcatcggctcagaagacgcaaacatctggcggaaccactgccagcgttatccggggtcaaccacctgggaatagcgctgggcggcgtctctctgtgcctgtgggtcatcgtcgtcaccatcttctggaccggttcggacacaatggccttcatgacgtcactgcccacttgggcatgctgcctcatcttctccttcccggcgcttattgcatggctggtcttcggttcccggataggcctgcttggcgtcattatctggtttgcgtacggcatcgtcattacggactttcttcctcccatttccagaacgggaatggagtattacaaaatgccgccggctccggatgcccggcaaatcagggttctcaccctgtacgggggttgtgtggaaaatccgcccattgaacaaatctccaaactccgcgcagacgtcatcttcatccagggatgcagcaaccacaaccggacactcaaattcgcctacagcattttcggacgcacttcctacatcaagcagataggcagctgcgccatcatcgtgcggcacgggcagattggtccggcccaaagcatcacggacacagccggactcatcgtggactggataccggaaaattcttccctggcgatacggctcatcaacatcagcctggagccttttgaacaccgctttgacttgtactcccccgcctgctggaaatacttccacacgctccggttcattcaccgcaaacagcttcaatacctgtttgacaccctgcgggaggtaggaagccagcacggtgaactgcccatcatcctggccggaaacttcagcgccgcgccccaatcccctattttcgccaagctcagcgccgattttcaggattgcttcaaactgaagggagccggatacggagccactcaacctgtcaacttcccgctgctgcgcctggaccgtgttttctgcacgccgccgctcaaacccgagcgagccgccactgtgctgataccggacaccgtccgccgctccatcctggcagacattgccatgccctgattcccctttccacacggccgcgccattccgctccggcagaaagaacttctccatccgcctccccaaacggaggcgcttttactttccggggaaagaattttccccggaaacctacaaggttttcagcgcacgggaaatagccgggaaaagctgcttcttgcggctgaccacatcggcggcggaaaacaagttggggcccagccgctcgtactcgatgtgctccagcacctcttcatccccgacggccagcagcatggaatcatgcgtgacaatgtccgtgaccaacaggcacgccagcttcaatccttcctcttccaccagcttctgaagctccttcaccaggtcatcctgaacttccttcaggccgaacatgcctatttcctcaatctgtgaaatgctgatcttgtgcccgtactcggtaaaggttttcctgtccgcctggacaatcgcgcagggcgccgttttggaacgcagcagagaaccggtggcaaaaaattcctccgtgaacttcttggcgtctatcctggcaatgccggtcagccattccagcatttcccggtccgcccgcgccgtcgtgggagacgtcaggttcagcgtatctgaaagaatcccggcgcacaggcaaatcgccaccgcctgcgaaggctccgcatcacggtggtaaaacctgcgcgccaccagggtggaagtggagcccacgggttcattcaggaagcggatcgggtcccgtgtggaaagctgggtgcccaggcggtggtggtccatcacctccacgatttccgcttcctccactcccttcacggcttgtgaaaactcattgtggtccaccagggccacgcgcgtacggggcggatccaccagatccgtcttgctcagcacgccgatcatcttgttcgtcttgatgctcatcacggggaacagcgcctgcttgcgcttcacggcggcctgcctcaactcgggcagcggcatgttctccgggaaaaccgtataatccttgtggacctgttccctcaccttccgggagcagcggataagctgccccacgctggccgtatcccacggggtgcttaaaatgcatgtgcccgtcgtctgggccgtctcaataatatccagggaagggaaagccccggacgtggtcaccagagcgcgcacgccgtgctccacggcatacagctggacattcgggcggtccccgcagataacgatcagatcgcggacgatgccctttctcttgtaattggcaagcctcgtccggacgctcggctcgctggaagcgcccaccagaagaatattctgcgtttcctcctcgctcagggtctccccggtcaggcacttgccgtcaatggtagtggcaatgttgctcaggctggaaaaaacggagcgcacattcatctccgtcatgttcaggggcatcagcaggctcagcaaatcaaaataacgcagcaggccgtaaagattgtggtccgcgtcaatcaccggaatggtttgaagggagttctccgtcatccggcggtacgccgtcaggaacgtgtcgtccggactcacgctgatcacgtcacggcggcagatggttcccgcggtaggcgtcacgtcatgaatcagcaccggttccggcaccccggctttttccagcacccaggatgtcctcagcgtcatctccccgcatctggcggcaaccgcgtcaggttcgccatgggttcttaaaaactccgcattccctatggcggaacaaatggcatccgtatccggattctggtggccgatcacgtaaatgggccttttctctattttctccggaagcatctctcttatctcctgcgcaggttaatctatattcaacctgacgggcaccaccaccttggaagcaatgggcgcgccgtctttttctgccggatagaaagtccaattctctttcacccagcgcatgaaaagacggtccagttccgcatttcccgttgattgaaggagattgacggatgaaggttcgccacggggattcacacccaccactactttcaccacggcattcaccttcccgactctagaagaattgacggaattgggcaaggacggagcatgtttataacgcacctttttatcaggagtcacgttctcatccgggctaggctgccccggcagggaaaccgccggagtcttcacgggacgcctgggctttacctccctcatggaaatccgcatgctggaaagctcctccggcaaatactccgtgggagtctcctccggaagaaaatccttcatgtcggaacaatcctcattctccggcagcttcatcgcaagcaggtcttcatctgcggaaatttccggaacggggctgaccgtggaaggggccgcgaccggctctacgggcacgggctgaacttccgccagctcctgaagaacctcctcggaaggaggcacaaactccatttccacctccccgttctgcacggcgggcagccacagctcctgaaaatgaatggctaccagcacggcgcacaaagccacctgaacgcccacggccaccgccaccgcaatcagcatggcggacttggaagtggaacggggcgtgaatcttacaattccgggcttttcatccataaaaaacgggcagggagaagggcagtgcccgttcaatataccagcgcccttccctttgacaagcgcctgcaccgccataagcagcccgttatcattttgttatctgccggaaaaacgcatggacatcaataacccaatgcctcccggatgctctgggcgaatctgccggccttttccgcaaagccaagctccggattctggtacatgatgccgcgggacacgttaatcagggggggggccgcatggccggaaccgctcaggctggaaagatcgccgccctgggctcccagaccgggaatcagcaggggagcgtccggaatgcgctccagaatggaggaatccgcattggtcagccccaccaccatgcctacggaagttttgcgcccttcctgcatggaacggcgcaccatgtcccccaccagttcataaaccctgcggccgtcggccagctcctgcctctccacgtccgcggaaccgggattggaagtgaccgccagcagataaatgcccttcccttcataattcagaaaaggctccagcgtatcataacccatgaaggggctcaatgtgacggcatccacgcccaggcgttcaaaatacgcctgcgcataatacttctgcgtctccccgatgtcgccgcgcttggcgtccagcaccacgggcacatcctccggcatatccgggagcaactcctccagcatttccaggccgcgcaggcccatggcctcaaaataggcgatattcggcttgaacgccgccgcatacggagcggtttcttccacgaccttcctcaacagggaaggaaccgactgcaaatcatccatgacggggcgcgggtccagccccacgcacagggcggaaccggtctttctgatgcgggcggcaagtttatccgtaaaagattggctcatgccgttcattaaaccacgggctccacgggcaggcaagccccaagcggggggcgttccggaggaaaggaaaaggcagatacggcttttccaccgcgcccgcacatgctatgttccggcccgtatggcacctacggaatcccagtcttcccccgctcctctctcctgcctggaaaagccgctgcccctggacggcttccagggcacgccggatgaaatcgaacagcaatggtatgaccgtgtctacctgggctccggagacagaatgaagcagcttacctggagagccgtcatcgtaggaatgctcctcggctccatcctctcccttaccaacctgtacgccaaccttaagatgggatggtccttcggggtggccctgacggcgggcatcatctcctttgccctgtggaacgccttcgtgcgcctgggcatctccaaatcccccatgaccattctggaaaacacgtgcatgcagtccgccgccagctccgcgggctactccacgggaggcacgctcacctccgccgtggccgccctgctcctgctgacggggcagcacatgccgctgggcgtcaccttcgcctggatattcttcattgccgtgctgggcgtcaccatggccattccgatgaagcgccagatgatcaacattgagcaaatcaggttcccggacagcatcgccacggcggaaaccctcaaggtgctctattcagaaggcaaaaaggcggctggacaggccaaagcccttctttactccgccctcttcgcctccgccaacgccatcgccatggcggcgggaggggaacaatggctgggcaccgcccagcagcaaatcctgggcaactggtaccagcgcaccatcttcttcaaatgggacctcatgttcgtgggcgcgggcgcgctggtaggcatgaaaacttccctcagcctcttcatcggcggtacagtctgctgggctctctacgtaccgtggctggaaagccagggactgcttcccgcgggagcgggctaccgggacagcgtgggctggaccctgtggggaggaaccgcctgcatggtcgtcgccagcatcgtggccttcctgttccaatggaaaagcatcgtccgctccttctcctccctgggcgccatgttctccctgactaaaaggcgggagctgacggacgtggaaaaaatagaaacgcccatgagctggttcctggcaggccagctcgtctccctgggggctctcggctacctggcgtacgtcacctttgacgttccgtactggatgagctgcattgcggtaatcatctccttcttcctggcgctggtcgtctgccggatcaccggggaagccaacatcacgcctaccggagccatggggaaagtcacgcagctcatcttcggcggaatcgcgccgggacacgtgacggccaacctgatggcggccaacatcacctccggagcatccagttcttcggcagacctgctcgtggacctcaaggtgggctacctgctgggagccaatccccgcaagcaattcatcgcccagttctccggaatcttcctgggaaccctcgtctccgtgctggccttccgctccatggtcccggacgtggacgcgcttcaggccttcaatgctcctggagccagaacatgggcggccacggcggaagcgctgggcatggggttcagccacttgcacagcatcaaggttctttccatcatcgcgggcggcatcctcggcctcattctggtgcttgtcccccgctaccttcccgccgcaggcaaatggctccccacccccatcggcttcgggctggcctgggccatccagtggaacgactccttcctcttctttgcaggggccgtgctcggctgggccgcggaccgctttttcaaggccaaatccaaggaatataaaatccccaccgcttccggcatcattgccggcgcggccctgacgggcatggccatcctgatgttcagcatttaccaggcggcacgctaaatatcttgacggactccggttctccggaaaaaagcatatttcggagatccggcccagggtcggcatcgcgtcagcgggcttccttcttcaacgtcatttcacccttggaatccccttcggaaacgccgctcacctccgccttcaaggtataggaatcaaggtttgtgcggtacttcttcagatcaagcctgtaggaattatccttattctccacgccggtccagccttcatgggtatctgcggccacctccctgttcccctcgtacaatttgacggaatgaatcttcagggcgctggggccgttcttccactggaaggtggcggtgtacgtgcctggtccggttacctggtccgtcacgttgaactgcaacggggatccctgttggaggtcccacggagttcccgtggaatgtctttcttccgcgctcagggcgtccagcatttcccggtgggcattcatcacgcggttggcgacggccagagcatccccggacggcttcgtggaatacacctttccatttccggcaaaggccagttcctcccggaccgtcttatccatgaaggcggcctgggcggcggcacggtccttctttccagtcagcacatccagctgggattcaaaaaaattcttccagcggggcagataaaaatcggccacaagcccggcccactggcggttggaataatcattcagcgcgcggggagcctggtcaatccacgtggtaataagcatcttggcggacttgtccatcaaggccttctcctgccgggtgctcccccaatccagcgccttcttctgccaggttcccagcaggaactggctgtccgtcgccaggagggcgtccatatccgaaaccagggacaggaaaagcttcacctgcttcctgtaggcaggtacgtctccggcgtcaaaagcgctcctgacccgctggagctggtaaaaagcggcgtccgcgagcacctggcggacgacatccaccaaatcatagcggaaggtctcctccttcaccagggatggctggtcattggccgccttcaaataaccgcgggccgctttaacgatgtctcccagatggtaatacctctctccgctggaccacgtggaagccttgcggacgtcccaggacgggcgggcgcagataatggactccgtacacccctcctgcgaacgggcgggattgtaaatggaggaagtcaggacttccaaagcccgcacgaccgctgccggagcggcgccgtaacgctggcgagcatacttcttgagccagtcccggacgggaatatcctccgccgtccataaacggtcgctgaagagggcgtaatgcaggggattcgtttccagcccttcggacaaggtgcccattcccaccaggcccttgtccctgtagccgaccaaatcactccccagccgggacagaaggggaaccccgccgtatagtcccgtattgccgccgaaattggccagctcgcaccagacccagggaataccgtcaaaagtcctcaaattcttcccgccgccagccatgtccttggtgagctgcagcacaagagcatgcctagggtccgtaccggccagcagctcgcgggaaggattgcccccccaggcctggatcacccaggaagaacccggtgaagccttctgcatggcgccctgaaccgcctgcgccgcgcgcgtcacgttaatgtcgcccttgctgccgccttcatggaacaaatccccgccgaacatctttccggaaatgccgtataccttgcggagagctttgtaccagcccgcggccagcttcggaaaagcctcgcaagtggggtccacaacccacggccttttgaaattgacccattccccctgcggaataagcttcagccccttcatctgcacgttctccgcaaaatccgcaggaacaaaccccacataaccctgaaggacgggagtcatgcccaactgctccatgcgggacacgatgcgcctacccatctgcgccatcctgtcaatctgctgctgggtcaacggtcctccgtgtccttccaggttgcccatattccaccaggcggcaaaagcgggattggggatgaagcggagagccttttcacggggataccccaggccaatgaggaaatcctcccaggtcttctccaggcctgccgtcaccagcgcgtgcgtaaacccgctcagagccagaaaatcaatctcacgctgccagcggttccagtcccagaaagccgccgtataggacagcgtgcagtaattatacgcaaaaacggtattccacggggactcaatcgtgacaggggtggacggagcaggcaacggagagggaagcgtcagacggtctccgttccatgaaaaatgcaccttggcaatatttttcagataccaaccgtaccccgctaccaggcggcgcacgtcagatgcttccacccggatgcctccgggagcgccagaaatagtaatcttgttgcccatggccggattcaagcggaacgaaacggcgccttttgcagatggagtcacacgagccaccacgccttcagcagccgctacgggagacatttccgcggcagagacgcaaacaagcggggacatgaccgttcccagaaccgaaccgactgcaaaagcatgtgaaagcatagcaccaactatacatgcaaaatccgcggtgtctttcaaggagtaatgcaatggcgggaaaagctggatagccccccttattgattttctaccgaagagcttggaggaggcaaaggcgcgacggctcggacaggcggcatgtaccaaatgttccacttagccggaggaaggaagatcgcgccatcaagaaaacgaacaagccccgccagttgaggaactggcggggcctgatgaaaaaaaatcccggcggcgacctactcttgcgggacctatcgtccgactaccattggcgcggcagcgtttcacttccgggttcggaacgggaccgggtgggaccactgcgctctggccaccgggcttcagggggaagagtttttcattttcttcatcctgcctgcccgggagcccttggggggctttgagggggattttttaagggttgttgtgtgtgtggctaagaagatttcctctcgttacgaggggaaggaatcagcgtaaactgacatctgcgtggctggtggtgttacttttaaacatacatccaatgaacaagacaacagcaagttgttattcacgaacgggagtgatgtaatatgatgaagtctattggtgattagtatcgcttggctcaatacattgctgcacttacacctgcgacctatcaacgtggtggtcttccacgaacctatagggaaaactcatcttgggatgggcttggcgcttagatgctttcagcgcttatcccgtccgcacttagctactcggccatgcacttgacagtacaaccgatgcaccagtggtgcgtcagacccggtcctctcgtactaaggtctgaacccctcaattttccaacgcccacagaggatagaggaccgaactgtctcgcgacgttctgaacccagctcgcgtgccgctttaaccggcgaacagccggacccttgggaccttctccagccccaggatgcgacgagccgacatcgaggtgccaaaccacgccgtcgatatgaactcttgggcgtgatcagcctgttatccctaaggtaccttttatccgttgagcgacggcaattccactttctaccgccggatcacttgggcctgctttcgcatctgctcgacttgttggtctcacagttaggcgggcttatgcccatgcactcgacacccggttgccaaccgggctgagcccaccttcgcgctcctccgttactctttgggaggataccgccccagtaaaactgaccggctgacacggtcctctggccggattcacggctcagggttagatcctccagtttcaaagggtggtgtctcattgatgactccgacgccccctaaagggcgtcttcagcgtctcccacttactctgagcattaaaaccgaagaaacaatgacagcttacagttaaggtctatagggtctttccgtccttctgcgggtaggcggcatcttcaccgccactacaatttcactgagcgcctggttgagacagtgcccaactcgtttcacgattcgtgcaggtcggaacttacccgacaaggaatttcgctaccttaggaccgttatagttacggccgacattcaccgggacttgggttcagagcttcgccttgcggctaaccccttgccttaatctttcggcattggtcacgtgtcacaccctatacttcgacttgcgtctttgcagagtgctgtgtttttgataaacagtcggttgggccatttctctgcggcctgcatcgctgcaggcaccccttcttccgaagttacggggctaatttgccgagttccttaaccaggtttcactcttacgccttggtatattctacccacccacctgtgtcggtttgcggtacgggtcgcttagcatacgctggggcttttcttggcactcgatccaatgatgcgctgagtccgtggactcaactcggaattcaataacctagtcatcttttctcatgcgtccccccagtttaagggtcgcgagctcaggattattaacctgatatccatcgcctacgcctctcggcctcggcttaggtcccggctaacccagggacgaaacacgttgccctggaaacctcgggtttacggcggccggggatttcacccggctttacgttactcatgtctgcatactcacttgcatgtgctccagggtcagtcgccatcacccttcaacgcgcatgcaacgctcttctaccactctaccgtaaggtaaagtccagagcttcggtataacgcttgatcgccaatcattttcggcgcaggatcactcgatgagtaagctattacgcattttttaaatggtggctgcttctaagccaacatcctcactgtctgtgtaatcccacatcctttccactgagcgttatttaggcaccttagctgctggtctgggttgtttccctctcgacaatgaagcttatcccccactgtctcactgccacgttccattgcacggtattcggagtttgataaggtttggtaagcgggtgtgccccctagccttgtcagtgctctacccccgcgcatcagcacgtgacgctgcacctaaatgcatttcgaagagaaccagctatcacggggtttgattagcctttcactcctaccctcagctcatcagagaacttttcaacgttcacctgttcggtcctccacatggttttacccatgcttcaacctggccaagggtaggtcacctccgcttcgggtccagtacctgcgacttaattcgccctattcggacttgctttcgctgcgactccgggccggaagcccttagtcttgccacaaacactgactcgcagactcattaaacaaaaggcacgccatcgcagattgctctgctctgacactttgtagacatacggtttcaggttctatttcactccgctcacagcggttcttttcacctttccctcgcggtacttgttcactatcggtcgccaactagtatttagccttgcgcggtggtccgcgctgattcatacatcgttccacgtgtgatgtattactcaggatcccactaattcccacgctggatttcgtctacagggctttcaccttctacggccagcctttccaggctgttctactatccagtatggtcgaatatctcgtggtcctacaaccccgaaggagtaccttcggtttgggctccatccgctttcgctcgccactacttacggaatcgatttctctttcttttcctccgcttactgagatgtttcacttcagcgggtttcgcgtttcataccctatgtattcaggtatgaacgatcgagtattgcctcgatcaggttaccccattcggatacccccggatcatcgcttgcttgcagcttcccgaggattttcgcagcttgccgcgtccttcttcgcctgttggcaccaaggcattcaccgtacgcccttacttacttcatcatattgcaaaagttttttaccacttccacaataccacaaagccctttcgtgacttactgtattgtcttatttcttggtatgcatgttttaaattgtgtattgtagttgtttttcaactacccactttgttggaaagcaattgcttctcagcaattgttttctttgccacgcagatgtcaattttcgctttccctcaataatcgatttttttggtgggcctgacaggacttgaacctgtgaccccgcgcttatcaagcgcgtgctctaaccaactgagctacaggcccggttttgggtctcgcagaggcagttaacagtgaacaggcaatagttaatagccatttatcgttctccgttgccgccttcttaccgaaactggtggaggcacggggactcgaaccccggacatccagcttgcaaagctggcgctctaccaactgagctatacccccagttgcggttctttttgaaaaaaggtcgtcacgcacgtcgtgcctagtttcgctccaagcgaactggctgtttacacatctttggttcgttgcgggccctcgcgggtttcgctctctcttccctcgggaagagatccgacctgtgcatttttcatgcactttctccatagaaaggaggtgatccagccgcaggttcccctacggctaccttgttacgacttcatcccagttaccagtctcaccttaggaccctgcctccttgcggttggcttcagatacttcgggtgcgaccggcttccatgatgtgacgggcggtgtgtacaagacccgggaacgtattcacggcgccgtagctgatgcgccattactagcgattccggcttcgtgtaggcgggttgcagcctacagtccgaactgggcccagtttttaggatttcctccgcctcgcggcttcggccccctctgtactgggcattgtagtacgtgtgcagccctgggcataagggccatactgacctgacgtcgtccccaccttcctcccagttgatctgggcagtctcgccagagtccccacctttacgtgctggtaactggcaacaggggttgcgctcgttgctggacttaaccaaacatctcacgacacgagctgacgacggccatgcagcacctgtgtaacgcctccgaagagtcgcatgctttcacatgttgttcattacatgtcaagcccaggtaaggttcttcgcgttgcatcgaattaagccacatactccaccgcttgtgcgggtccccgtcaatttctttgagttttaatcttgcgaccgtactccccaggcggcacgcttaacgcgttagctccggcacgcagggggtcgattccccgcacaccaagcgtgcaccgtttactgccaggactacaggggtatctaatccctttcgctcccctggccttcgtgcctcagcgtcagttaatgtccaggaacccgccttcgccacgagtgttcctctcgatatctacgcatttcactgctacaccgagaattccggttccccctccattactctagtctcgcagtatcatgtgcagtccgggggttgagcccccgcctttcacacacgacttacgaaaccgcctacgcacgctttacgcccagtgattccgaacaacgcttgagacctctgtattaccgcggctgctggcacagagttagccgtctcttcctcttgtggtactatctttttaatttgctcccacatgacaggggtttacaatccgaagaccttcattcccccacgcggcgtcgcaccatcagggtttcccccattgtgaatgattctcgactgctgccacccgtaggtgtctggaccgtgtctcagttccagtgtggccggacatcctctcagaccggctacccgtcatcgccttggtgagccgttacctcaccaactaactaataggacgcgagcccatccccaagcgcattgctgctttaatcttgcgattttatgcggtattaatcccagtttcccggggctatcccactcttgggggcaggttactcacgtgttactcacccgtgcgccactagagaattattagcaagctagcaattctctcgttcgacttgcatgtcttatccacgccgccagcgttcgttctgagccagaatcaaactctccatcaaatataatttttgaaattgctggaccaaatggaatctttcgatttcatctgcgccatgcttcagtcagctcttccctcaagttgtgtctcttgaggtcctcttcgctctgccaagcacggcgcgcgtcacgaccttttttctttccccttgcttctaccaatccgcccctctcggagctaggtcgctccttcgggttttttctccctcacacgtcctctcgacgcattcaggaaaaccctcggcgggttcggtagtcattcccttgaaatcttcttatcggcccctttaatgaggctcttccgggtggccggccccggcttcattcaggccctcttccgagtccctcctgccgccgggcttttcatcccgtcgccgtgttggcgtgccgagaagtctaccattttcacctcccttgtcaatttttttcgagtcgttttttgtgagagtctttcacccattttgtcacgtccattcataacttccaatttataaaatagttaggcttttgtcatactccccctccctcgtgccatttttttgaacattttcttttcggatggcgcagcagtcttcccaaaggtccaggagcccttccctttgccggcgagaacgagagggggctttcttcctttttacgatatcggcgccctggagaaaagaaggggggaagaagggctggccaagcgaggagtttcaacagcccaagggggaagaggttttcttttttccttttacaagggccgacggctcgccttctctgccgatacctttatttctaccccttactttcttttcctccaaggccacgcacggacggggattcttttttccgcgccctcaccgttcgatatttccgcgccctgtctcacttaacccttcccatgaacaatccccgcctgaattttgtctaatcgcgcatgaagaatcaggaaatccacttgccaacgcccgaccccgagcatccttatggaggaggaaacggacgttaccgttttccggatatcaacggcatgaatttgctgggggataacgtttcccttccacccatcgtgcctaaaagcttccatatcatgctgaccgtttttcatccggaaaccctgtacagcatgaagaagtggcttccgttctgcgaagacctccgcaagcagtacaagcatacgcccaccccggtggagtacaatattctgctggtcctgcagccgcctcccattgagggggacgttcccgcctttacacaggccctgggggatattccggatttctacatgaagaccaattcccttatttcctattacgaccaggctttcgtgcgccgcaggctttccctccacaagaaggcggagaccgcgattgtactgctggacggcaacggcaatatcatctggaaggatgacggcggctttacgcctgcacgcgcggaacatttaaaggttattctggaaaccctttccccgctggcgcctaagacaaggacgcattagaggcggattgcatcttctttgcctcattcgcactttccgtttgagcttccttccggaatgcctcatactggccccatgcctaccatttctcttgctctcggggaacgttcctacgatatccacgtggaaaacggcgcgctggaccgcgtgggtgagtttgcctaccgcgccggactggacggcaagattgcgattattacggatacctgcgtagccccgctttatgcggaacgcgtgatgaagtccctggagagcgctgggttcatgcccagcctgcatgtggtggatgccggagaagcgtccaagaatatgctgcaggcccaggaactgtgttccgagctggtacgggcgggcattgaccgcaccgggtgcattgccgccctgggcggcggcgtggtgggagacctggccggcttcgtagcttccatttattaccgcggcattcctttcatgcagattcctacgacggtagtcgcccaggtggacagttccgtagggggcaagactgccgtcaatattccggaagggaaaaacctggcaggcgcgttccatcagccggccgttgtcgtgatcgaccccaccacgctggtgaccctggaccgccgcacgctggcggaaggcctggcggaagccgccaagcacgcggccatccgggatgcttccatgctccatgaattgaaaggcctgggaccggagctttccatcggcttttccctgaataccatcgccaaactccccgatctgattgcccggaacgtggcgatcaaggcccgcatcgtggagaatgatgaattggaaacactggatatccgcgccctgctcaatttcggccataccatcggccacggcattgaagccgctgttccctacggcaccatcctgcacggggaagccgtggcgctcggcatgcgcgccgccctgttcctgagcgaacggaaagccgggttgagctcttccgacgccaagaagattctttgcaccctccaggctctggaacttcccctggttctcccggatgacattgatacggaaacggttctcaagaagacagcgtccgacaagaagttccgggccggaaccatccgcttcgttctgctttccaaggcgggggaagcaggcatttccaagaagattacgcgggaagatatggcggaagccattgaagaattgcgccgccccctgccctgagcttcctttttacggcgttgccccatcagccgggcaaaaaaattccggagaacggaaggggagcatctttccgctccttttcctccagcatgtttttccagcaggagaaagattcagagtgtttccctgaaccgcagaaaaaccgtcccctccggaacagcctggaagccgggacatttattttccgtatccggcgcccgaaaagcaacgcctctcccttcccggaagaacgggatgggaaaggcgcagaaacagtccatcgtttcccggcacggggaatttactttttcggctcgtccggggtaggttcaaagccatccacgtccagaggcacgctgcccgtgtattccccggcgtcaaactggatgcccttcaaggcgtcttccagggacagggagccatagcattcccggctggccagacggagcagttcattcatgatgttcacgctttcttgatggggaatgtccttgggaagggccacggccagctccttcacctccgccgcatgggcgtttgccgtagcctggtcctgaataagaaggagaacggccaggattttttctcccggcgttttgggaacggcctgttcgctggcggcagaggcatccggggattgatcctgttttttgccgccgtcacaggaaacaagggcaaatgccgccaaaaccgctgtaaaaggaatgagattttgcttcatcatgatgattggttggaaagccggaggcctcattggatttatcatgaacactggggattccggagtcaaatcagttttttactctcacgaaatgttttttcagacaaaatattccgcagcgtgcgctttgctttctgaacagggggagtagccctgttcaacctaatagccagaatatagtgcattcattggttccctcagtagacgcaatttccggaaacggaggttgcgtctactttttgcgtcaccatttcaatacagcgtttgattccatgggctgacgccgtataattccgctgagatgggttaccctatttggaacagacgccgttttttgagaaccgccgctggaacggccgggttcctggcagccatgccctatctgaacgccgcggaagccctgacggacgcaagaccgctcaaggtgggcctggtaggctgcggaggccgcggcctgggcgccatgaagaacgcgctggacgccgaccccggaacggtagtctgggcgctggcggacgtgtttcgggaacggattgatttcggctccaatttgctgacggaacagtacggcagccgcgtccagctggacaagagccgcctgttcgacggcctggacggttacaagaagctgcttcaaacggatattgacgtggtgctgctctgcacgcctcccgccttccgtccggagcatctggcggcggccattgacgccggcaagcacatttatgcggagaagcccgtggcggtggacgttcccggcgtgctttccgtgctggagtccgcgcgtctggcaaagcttaaaaatctggtgattctggacgggttctgctggcgctatgacaaggcgaatgaggaagcccaccgcaagctttcctccggagaactgggacgcgtgctttcctttgacgggctgtattacaccacgccccccaaatccccgctggctctggattcccgcccttcctcggatacggacgtggcgtgggccctccgcaactggaccgcctggaactggctgagcggcggccagttcgtggaacagatcgtccacacgatcgacggcatggtatggtccatgaacgagcagcttccgctggcggccttcggctccggaggacgcgcccagcgccgggacgacggcgacgtgtgggaccattacgacgtttatttcgagtacgaccacaacgtggccgcccacatttcatgcaggcagtgggtaggctgccacggggagatcgtggaccggacggtttgtgaaaaagggatgctggtcaccccgtaccgcccccatatccaggcggataagcgctggcgtttccgcggggaacggggcaatatgtacgcggacacgcacgtggccttttaccgtttcctccgctccggaacctggaaacaaacgctggaaagcgcggccaataaaacgctggtcgccatcatggggcgtgaagcggcccataccgggcagcgcatcacctgggaacagattaagaagagcgccacgcggctggtgcctgaagacctgacgatggatacgcctctgcctcccgcccgcattccgcggccgggcagagcggcctgacggcgggtcccgccttttctctctaccggaccatggccaacatctttccacccaataccaacaggcgcttttacggaggcgtcgcgctgattgcgctcgccgccgcgctggcgctgggtggggtgtattacgtcaatttccagattccggagtatgaacccgtgcagccggtgcgtttttcccacaagctccacgccggagacctgaagatgagctgcacggcctgccacagcgccgcccagcgctctcccagggccggcattccggatacgaagtcctgcctgggctgccaccagcatattctcccggacagcccgctcatcgctccgctgcgagcggcggcggacccccaatttcccggctatacgggggaaccggtccgctgggtcatggtcaaccgcctgtccggccatgcctatttcaaccacatggcccacctgaaccgcggcatcggctgcacttcctgccatggggacgtggcaggcatggaacgcatcagggctccgcgcgatgcccgcatgcagtggtgcctggactgccaccgcgaccccgccccgcacctgcgcccgctggaggagacggccagctcccattattccgccgcggattaccttcgcacgcattccatccgggacggggagggaaaccgcatccaaactccgcttcaattgggagatttcctgaaacaccagtggaagattcagccaagaatggactgcaccgcctgccaccattgaccaccgggcgcaggccggctcccggcaaacatgcctttccagtcatcataccttccattttcgcgatagatgaatgccggaccgttactgtatgatgaagttatggaattggacctcggcattgtttactcctgccctccggaagaagcggtcccgcatattctggcttattttcagcaggaattttccaaccccttccccgcccccaaacctgtttcgcatgaagaagaacttctcctggaacaaatagattccgcctttgacggcgtcattctggaagacggcatcggcctgatgacgacggaactcatcgacatgtacgcccccagggaaacctgtgacgccatcggcccctgtgaagagcggaccgactggcgccgcatcaccccttccatgatccgggcatgccgggacgccctggtttttaccgatccaaagggataccgttttctcctgccggcatggctgacgctggacctccgcggccagcttgaaacctgcgacgccatggactaccttcccctcgttccggaaaattgcggggattatgaatccagggccatcctgctgaacgatccccagcttgaggccgtaatgaattacattgaataccgtcaaaaaaaggacggatgccctttttccacggacttccgctgccctgaagatgggtgcagccggtaatcaccgcttgatttcaccttccggattgcctaaaacaagccgttcccatttcccgttaatccacatcatcctccggtttgactccccttcccccatttcaccagaatgaagctccccagggccaccccgcttttcttccggaagaagagcgggaaatgacgcggcgctccttcatgaaatggatgggcgcgggcgcagtcctggtgggggtggggcttccggcctgccgccgtgtggaaaaatacctggttccctataatgaaggaccggaatggtccgtgcccggcgtggaaacggcttacgccacctgcctgaccatgggcgggagcgcgctgcccgtgctggccgcctgttatgaagggcgtcccgtcaagctgcttccctccctgcaatatccggaaggcccgggcttgccggccacggcccaggcttccattctggacctttacgacccaggccgcagcaagcatatcctctttaacggcaagccggcttccggggacgaattccgcggagccttttcctcctggtcccgcaacctgcgggacggcggccatatcggcatccttcttcccgccacggattctcccctgatgcactccatgctggaggaaatcggcaggaaaaaccccggcgtgcggatttaccgctattctcccgttcccacgccgggctccggcatgcaggcaggcttgccgcaggaggtccgcttccgcgtgcgtttcgcacgcgccaaacgcatccttgccctggattgcgatttccttcatgaggatccctacggcaatacgcgtgatttcattgccgcccgttccccggagggcctccattacaaggaagaaaaccggaaccgcacgcgcctttacgccgtggagggccgcgtttccctgaccggagcccatgccgaccacaggctgcccgtttcccccgcgcgcctggcggtctttctggaggaattgttccgctatctctccggtaaaaaaacctcccttcagacgctagagcctccccggcagacggaccgctccctgacggaaagggaattcacctggctccgccactgcgcggacgatttattcagccatcccggagaaagcgtggtcctgctgggggacaatcatccggaactgtccgcaagcgtctggaagctcaacctccttctcggctctatcggaacgtgcgtccagttgttgaaggctccgtccacgccgccccacggaacgctggaggatttcatccgggatatccggaagaaagaggtggatatcgccttcctgctggattcgggaaatcccgtgctggattccgggcacggctccgcactggcggaagccctgaacggaacggagagcattcatctggggatgtatgaggatgaaacctcacgcgcctgccgatggcatttgccggcggcccattttctggaatcatggggagtggaatgggactgccgcggcagattctgctaccgccagcccgtcattcttcccctgtacgggggcatttctgcggaagaagtgctttccgggctgctttccaccaagggccacctcatcacggcggacaattcgcccacgcacctttcccccgtttaccaccgggcgcgcaaatgttttgaacgcgccgtgaatccggaaaacaagactgcggcctggacacaggcgctccagcgcggctattcggaagaaacggcttatccccccctgtccccgcaggaagaaacggccctcggaaccgccatggcgcaagcgcccgttgctccctccggcaacagcggaagcggattggaaaacggcctgctggaactgcaattctgtccggattattccatcggggacggccgctggaagcgcaacgcctggatgcaggaatgcccggaccccgtaacgggcgtcagctgggcggcgtccgcacaggtttcccccgccaccttccggcggctgggaggcgcggattccgggccgatgctctgcactctgaccgtccccggcggacggatggaagccatcctgtgccccattcccggagtggcggagaacctgatggttcttcccctggggtatggcggcatgaaccacgtagcggagaggcaggagaattccgacggttatgcattccgcagtcagatgaaaaaaacggcaggctgtggaatttccccggaacaggccgccctgcgcgcccttccggaacgtacggaagctgttcaaagccccgtcgtgcagccctcccccttcgcccttcagtccggcgcctctccggctccgttcacgccgtccggcgcggagggcgtgtaccaatggagaatggcgatcgacacgtcccgctgcatcggctgcaatgcctgcgtgatcgcctgccgggcggaaaataacattcccgtggtgggccgtgaccagatggcgaagggacgcgcgctggactggattcgcattgaccggtatttcacggaggcaggggcgctcaccgccattcccgtggcctgccagcagtgcggcaaggccccgtgcgagtccgtgtgccccgtgaacgccaccgtccacaccacggagggcctgaacgctatggtatatgcccggtgctggggtacccggtactgcgccaccaactgcccgtacaaggcgcgccgcttcaatttttttgattatgccaaggcctccggggaagccacgcgcctccagcgcaatccgaacgtgaccgttcgttcccgcggcgtcatggaaaaatgcacctactgcgtccagatggtggaacgcgccaaaatcaggcacaaatcccgcctgatgaaggaacacccgggccagccctccacttccatccacgtgacggagaaagacctgctcctgccggacggcgcggcgcaaacagcctgccagctcgcctgcccgatgggcgccatcaccttcggcaatgtgctggaccccgccgccgccgtctcccgcgccaaatccctgccgcgccacaggagccttctttcctccctgggcacggaccccggaacgggatacctggccccggccgggaatcccaaccccgccatggaagcatgaaatcccgccggaagacttgttaaagacgcctttcccaccaaagaataaggccgctcctttcagggagcggccctaccagtcaaaggtctttacaagctgatcatttagtcttccacaatttgttccacggtcgtaatcgtttccaccacttcaatgttggcggcgtcagcgaaattgttcaccgccttgagcagggcgggcgtcatgagcttgtccttctgaatgcgttcgcaattttccagcatgtccacgatggtatcctgggcatctccgttcagtttggtgatccggatggcctgttcggaagtgagcttcattttttccatggccttgtccaattgcttggcctgctgggtcagggcattgagctgcttgatggcgatttcaaccgccgcattgtccttcacgtcgtccagaaccttgttggcggacgaaatcaggtcgacattctgcttaaccatctgcacgggatcggcagcgttctgagcaagagcggaggcggagcatacgatggccaccacggggagtatttggtacgtttgaatcattgttttatcggtgttcgggttgaagaagaaatatcttctttgcctctttagattcattccaagagagaaaccgttgcaccccatatctgtcatacagtccttaccgtctgactgtcagcaaacggcaggaagacaatcttaccccgtcacacgtttttcctccccgttttccagcagaaaacggagggggcggtacttggcggattccagattgggatcctccgccagaatggcctccgccagctcccgcccgcggtgaatcaggcgcgcgtccagcagccattcctcaaagcgcacgcccttcaggccgctctgggaagtgcccagcacgtccccgggaccgcggagcttcaaatcctgttccgccaagtcaaaaccgttggccgtggtctccacaatatgcagcttctcccattgttcctcctccggccgggcctccgtcatcaggatgcagtaggacttgtgcgccccgcggcctatgcgcccgcggagctggtggagctgggagagcccgaaactctccgcattattgataatcatgaccgtagcattcggcacatccacccccacctccaccaccgtggtagctaccagcacgctgatgcggttggcgcggaagtccttcatgaccgcctccttttcctcggaggacatcctgccgtgcagcagtcccacatccacatgcggcagcagcgccttccactcgtccagctcctttgtcacggctttccctttccgggaatcctccccgtcaatgaggggggaaaccacataaacctgcctgccttcctccaactggctccggacgaacttcaataccttttcctggtccttctccgcgcggatggccgtaaccaccgcgccgcggcctccgggaacgccgtccaggatggaaacgtccagctccccgtaaaaagtcagcgtcagcgtgcggggaatgggggtggcggtcatcaccagcacgtcggggcgctcttcgcggtcaatcagcttttcccgctggttcacgccgaatttgtgctgctcgtctatcacgaccagccccacacgttccggcacgttcttcccgtacagcagggcatgcgttccgaccacaattcccccctgcttcccgaaggatacgtgggattcctccttcctgtccgccgtcaccagggacacgggaacgtccagcttgtccagcatctgccggaacttcaaataatgctgttccgccagaatctgggtgggggccatcatcacggcggaatacccgtgttccacggccagcagcatcgcgcacagggccaccagcgtcttgccggaccctacatccccctgaagcaggcggttcatggaacggggcgccttcatatcccggtaaatctccctcacgcagcgcttctgggcctccgtcagctcaaacggcagagaatccgccaaatccttcaccagatggctggagcctgccgtctgcatgccgggcacttcatccgcccgccttctcctgtaagccacgttcaactgctgcgccaggcactcctccagcgcaaaccgccgcctggtccggtcgcgcacttccgcggtctccggaaaatggaggtccctcaacgccgttttgcacgggatgtccggcacaaactcgtaaatctccggttccggagccggggaaagccgggccagagcctcccacacgatttcccgcagcctgcgcacggcaatccccatgcggccgctgtaaacgggaacaatgcggttcaaatggatggactggtcatccccctcccggatgatctcaaaatccggatggacgatgctgagcttcttcccatacggcttcacgcgcccgtacacgatcatctcctgcccggcgcacagcatcctggctacgcccggcatgctgaaccacaggcaggaaaaacgggcctgccccaaagattgctcatccaccagcacggcttccacataccgcccgcggcccttgccgcccttccctccccagcctttccagcccacgtccaccacccgccccctcaggcagacgggcgcaccggatgacagggaatcataacggtcaaacatgcggcggtcctcatacctgcgcggcagcatgaacagcaaatcccgcacggaggccattcccgccgcctgcatggccgccagctccctggggcggatgaaggcgcactcctccaggggggacgttaaaagcagctctccggccatgggtccaggcgtattcctcacagatcgcatcatgcccgcgcgcccgtcagagagcggcggcggggcgggtttccagacagcgcctgtaataatccacgcgggagacgaaccagctccatttatgccccgggcggccgttggtcagcagcggggccgggcagttcttgcccgtccagtaataatggggcaccacattacggaggggaatgttgtactgcttcatcagcaccgccgtcagcttggcggaacggttccaggtgacgatggggttgtggctcctcacctcccccatctcaatcccgatggaatacatgtctccgggaccgccgcggtccgcatggcgccccgtctcgttcagcggaatatgctggatggcccggtactggtccaccgtaaaatgccagttcagggaacccatggccccccttttcagcgcacgggcatgcgccgcggcgtctcccgtggggttggccgtgctgtggatggtgatgaagcgcggatgcatggaatgggaggcgcgccgcgcgcgggagcgcggggacatgaaatcgcggctgatgtgcacttcccgggacatctgggacatggtgcgcggcacggggggaacgttctgaatcttgaagctgacggcaggcgggcgcgaggcgtccgaacacgccgccagcagggccggcagcaccagaaacaccgcatttgccatcaacgttctaacattcatgattcttccctagactatccggcgcgagctggcaagcagatttccagtcaaaacaggctttttcacccttcccggagcacagcagcggggaaacgggagcccccgcggaacgctccggagcggccaccgccggaatcagggcaacgccttcccctgcacggggtttcccctccgggagcaaccaaaccgccccataaaaagccgcacgggagacttgccaacggccatttccgtgcatacactatttccaccatgagtaccactcacgaagcagctaagaagtgggtcgacgaaatcgcccagctttgccaacccgactccatctattggtgcaacggctctcaggaagaaaatgatgagctttgcaacatgatggtagaaaagggcacctttatcaaattgaaccccgagaagcgccccggatgcttcctcgcccgttccaccccctccgatgtggcccgtgtggaagaccgcacgttcatctgcagcgagaaggaagaagacgcaggcccgaccaaccactgggccgaccccgttgaaatgaaggccaaactgaagggcttcttcaagggctgcatgaagggccgtaccatgtacgtgatccccttctgcatgggtcccctggactcccccctggccaagatcggcattgaaatcacggactccccctacgtcgtggtcaacatgcgcatcatgaccaagatgggtgaaaccgttctcaagcgtctggaagacgaagtcaagggcggcggcaaccccaagcgcgacggctacggaaccttcgttccctgcctccacaccgtgggcgccccgcttgcagacggccagatcgacgtgccgtggccctgcaacgaagaaaaatacatctgccacttcccggaaacggaagaaatctggtccttcggttccggttacggcggcaacgccctgctcggcaagaagtgcctggccctgcgcatcgcctccgccatcgcccgcaagaacaagtggatggccgaacacatgctccttctgggcattgaatccccggacggcacgaaggcctacgtcggcggcgcattcccgtccgcctgcggcaagaccaacctggccatgctcgttccccccgcctcctaccgtgaagccggctggaagacctccatcatcggtgacgacatcgcctggatctggccccatgaagacggcaccttccacgccatcaacccggaaaacggctacttcggcgtggctcccggcacgtcctacaagacgaacccgatcgccatggacaccatcaaggaaaacgtcatcttcaccaacgtcggcctgaccgacgacggcgacgtctggtgggaaggcatggacggccccgctcccgcccacgccatcgactggcagggcaatgactggaccccggactgcggccgcaagtgcgctcacccgaacgcccgcttcaccgctcccgccgcccagtgcccgacgatcgaccccgaatggcagaacccggaaggcgtttccctctccgcgatcctgttcggcggccgccgcgccaccaccatgcccctcgtcttccagtcccgcgactggacgcacggcgtttacgtcggcgctacgatgggttccgaaatgaccgccgccgcattcggcaacatcggccaggtccgccgcgacccgatggccatgcttcccttcatcggttacaacgtaggcgactactggcagcactggctggacatgggcaagaccgttgccaatcctccgctgatcttcaacgtgaactggttccgcaaggacaaggacggcaacttcatctggccgggcttcggcgacaacatgcgcgtcctcgactggatcctccgccgcgccaagggcaaggctgaaggccagaagaccgtgctgggcgtctccccgacctacgacgaactggacaagaccggcatcgactacagcgaagaacagttcaacgccaacatggctctcaacccgagcgaatggaaggctgaactggaaagccagaccgaactgttcgacaaggtgggcaaaaagctcccggccgaactggaagaacagcgccagatcctcatcaagagcttctcctaagcggaactcctgactgagcgtcaactcaacagcagaggctgtcccatccgcgggacagcctcttttttattcccccgcatcttctccaaacacgctcatggagcgccgcgcgcccttgcggcaaccgaatagtcactcttgcggcatggtcaaaaatctccaacagccatcggataccgattaaaaggtcgtggaaatccgtgtcctttccatgttatgggtacgtggaaaatgaagggcttaaagagctgtaatgatactgcatgaatagaaaaacaaaaatcgttttcttcctgagtaaaatattcagcaatcttgtgggttgcagctttatttttacttgagccgctatttttattccgggttcttctgaaagaaagaaatcgaaaaacgggtatagtaagaatatgtccaaccgtgtgttttgatggaattttatggccgcggcatgtgttgctgggtcattcccggcatgatgccgcggccacttatccctccgcattcatccgggacggcttgcatagtacccggttcaatagggtcatgatataaggaaacggcatttcaaggatgttaaagagatgaaattaagcttcattatactgagcctggtcagcggactggcactctccgcccctccccgcgaactttccttttatgccgtcagcccagttgagggaaaagcgccggtggtcgacggctgcctgaacgaggcagcctgggaaaaagcggccgtattccgtcattattatgtttacaattgcgcggagccgactccgggaaaactcaagacggaattccgtatgctgtatgatgaaaaaggaatctacctgggcatcatcaatttcgaggagcatccggaaaaattgaggaagatcattaccgactttgacaacgccgccatttggaccgacgactgcgccgaaatctttttcgatgccagggccaatggaataagctaccattgtttcaaggtcaattgcatcggaacgcgcgccgatttccgccgccgggacgccgccgtttatcagaatgactggagcggcaccgactggaccgcccggacctccatcggcaaggaccgctggacgattgaagcgtttttcccctggagcgacctgcccgccaaagcggaaacgtccgatatctggatgttctgccacgtccgttatgcctactccggcggaaattttgccggagccgccagttcgatattgggcggatattcaagcccgcgcaatttcggctatatttacttcaagggagcaaatgacactgtttcgccggaaaagatatccaccctgctgtcgcgttccgcggaagagccatggtgcgccatggctggcgacaccctgatcctgcgagataaaggtaaaagtgtccttacggaacccggccaggtgaagaacaatgaattcgcggaaattgaaaagctatcagccgaactggcacgggcctgcgggaaatccgcttttaaaaagtaccgggaagaactggatgcgatcaaccgtgaatgccgtgttctggagaaagaaaaaaccacggtcagcggattaaggcgcctttacgtcctgaaagagcgctgccgggcgctcaaatggaaaattgccctggaagaaagcctgaattaactcaaaaaagaaagaccatccattgatgaaaccattcccactgttgctctgcatcctgctggcgggccttgttgctcccgtattcggcaaactggacggcacttacatgaatgaggccggaatgaccctgaaaacgccccatgccgcatgggatgaaaaaggagagcttccccataagaaaatactttttatcatgcagcaaacggcctcgcgagagatcattgagctggtccagcgcttcccgggctttgaatatgaagtggttctcacagccaatgaacatagcatcggagcggatgatatttacagcaatccgatcgcggggctgagcaccgccgacaaacttcaggaactggatgccaaactggcaaaggattatgatctggtggtcatggcaaacgtcgattttgcggtcctgccggatgaacagaaattccgcctgatgtcgatggtgcggaacggaaccggcctggtccggattcaatccggcgaaccctggtccgaacttaagaaactgccttataaaaaaccgtacgcccagccgttgccccggccggaatgggttgccggaagcaacagccttcccggaaccaggcctaaaaactttgaatcgcgtattttcaacgcctggcaattcggcaatggccggatcgtcgaagtcgattacggcgcgggctaccggccaggagtggggctgacgccgtatttcaactacaccacggactggttcttcctctatgaaacgtcccaggcttttctggcccaggtgctctattacgccagcggaatagaactgccggcattctcagtacggcaggacaacggccaatttgccgtgacctctccggaaaaaaccgttgccgagggccgtatccggcagccggataattccgtcatccggaacagccttgatttcacgaaccttccggcgggcagatatgccgcagacgtattggtccgccgggatggcgcgctggtcaacttcggcgcctttccctttacggtggaatcctctttcggggccgtatcagtggaaacgcccaggctggtgcaggaccgcggccccttctccgtcacgttgaaactggcttcgcccgcgcaggacggttattccgccaaagtggagctgatggacgcaccctaccgcaatgtatggttcagcaagacccttcctttggaagccggaaaaaaagagctttcattcggccttgaaaattaccggatgccgaccatcggcggttatctgcgctgtaccgtttacgatgcccggggacacgcggcccatgcggaaaacccggtgattttcccggattattccctggaagattatctccagcttacctggggccaggttggctgcaccttcaacccggccttcggggagcggatcatcgaccgcctcggctggaacgtatcgctgcaatttttcagcaagggagatattgaaaacgccctgcggaacgaaaaactgtgcccgtatatctgccggatcgggatggaagccgggccgaacaatgaaaccagaatattgcgcaagctgtggtccgaacagaaagaaaatatggagcggctgggtacgttgaacggcgacgaatcgttctaccacccattggtccggaagctttggagcgacgatctgcgacgccaggcagagtacctgaaagacctgagccctgtgctgtacaacctgggcgacgaaaatttttacacctacgatgccgggttcggagagtcggataaacagccgttcgccgatttcctgcggcagaagtaccagaccatggaaaacctgaaccttgaatacggcgcctcctatgccggattcggtgaagtgccccacctccggctggacgcggccaaaaaaacgggaaatctggtcgcttacaatgaccaccgggaatatattgaaaaaatgtacgtggacatgcatcatttcctggcggcggaaatcaaaaaggttcatcccggagcccgggtaggcgcggaaggctcccctcccggcaaccttgaagaaatgattaaggggctggacttctggggcccttacagcggcatgcaggagaacgaggcgctgcgcgcattcggcgcggaccgggtccggaccatctggtggggcggctattgctcggagcgttcatcctatccgtacaaactttgggaacacctgctgcagggagcgatcaacggccacgcctggttcctgatcaaccccgccctgggagaaaccagccattccggcgatctctccgaggcggaatacctgcgccagtacatgccctatcttgatgacttgaactacggcctcgcacagctgctgatcaaaaccccgtttccggataccggcatcctcttctactacagccacacctccaattccgccgcccaggcggacagccgctgcgtcaagccggacgccagcatgaatccgctgctccggtattgctaccagcgcgggctgggcttcaatttcgtctcgccaaataccctggaacgcctgaaaaacgcacggctcctcttcctctgcggagcttcctccctgagcgacaaagagtgcgcggccattctggatttcgtcaaatccgggggcaccgtactggctgacgccaatatcgcgctcctgaatgaaaacctgaaaaaacgtccccggaaccccttgagcgaacttttcgggaacctgacgttcgaccaggcgaaagagctcgaaatccagccttatgaaagcacaagcggagccctggccctggcgggagaaaaggcgcatgcggtccacggcaatccgggcctgcaactccgcaaggccggcaaaggaaacgccatcctgctgaatgcctccctctccgttctggaaaataattccctgcccggctcctccctgaacacgttccttgaccaggtggtgaaaaacgccggtatccgtcctctggccgtcatccccgatttcagcgacaccctgatgatccgtccgcggcaggccggagaattcgaactgctgggcgccctcggccaggaaaaggacctcggcaaatcattcaccgccaaattgccggaagaaaaatacatctatgagtgccgcaaaggactggtggggaaatcagacaagcttgtctttaaattctccaatgcgccgttccgctgctttgccctgtttgaccgggagcagcagccgcccgtggtaaccgctccggcccaggtggccaaaggcgcccgggccctgcttaagatttccggaccggccaatccccgggaacgcgcgtaccggattacggtaacggccccggacggcagggaaattctgcaccgcagcaaaaccatttacggcaagacggaatacccgctggatttcgcctttaacgatcttcccggcgcataccgcatcaccattgaagacgcggctacaggcttgaatacccaacacgaaatagaggtaaaataatcatgcagaaactcaccctgaccgtactgcccggattgtgcaccacactgctgtacgccgccccttccattgaaaagaaagaagagaaatttgaccgcaagggaactcccgtccttgtgacccgccataccgtcaaccttggcaacggaaaaatcaattaccacaccgttaccaatcccaatgacaacaagccggttcagcaggaatggggggatttcagattcggcatcgaatattggaggaaccccaatactcccggaagctggagccccgtcaatttccttgccgtgatcggcaaggacggcaaaacactgctggaccggaaagtcgcggaaaaaattgacaccgtagaaaacggcaagatggaaatggccgtattcacgttccgcccggaaaacagtgttctggacgtcaggatagcgcagttcaaggatcgcccggactggctgttcgtcaaggtcagttatcccggacaactgtatgaagtctgggcgtcgccggttcacggttacgggaagccggaactgaagtcgcaattcgccctgaaagaaggggacggggaaaaaccatgcggaaagccggactgggttctgacgaaaacaaccggaggaaacggggtaatgaacttcaaccgctatgcttacaaggagttcggcactttcatcgtttttgagaaagaatccctccgccagatccggattcatggagatgatatcaaatttgagctgaagccggagtcggacagcttcagtttcgccataagttatttcaaagaccggaacccggaggaggtgcgcccggaattcttcaacgtgacggttccggaagtggaaagcttcctgaagtccattgattggaacccggtccccgaccggaagacgttttcagagcttgcggatgaaacccggaaaaatatctccatcctgaaaagggacgacggccatgcggcggactatgaaaagaaagtaaaagaactggaaaccgatttttccgaagcgccgagttttgaaactctggccgccctccgcgaactgaatagggaagtcatcaagaagaaccttgaaaacctgtaggaacacggtattcatcgacgccgctggcaaggcatcctgtagaaatttcctgggctcaggacccggtatgttccagccggctttggttcagggaaaacggtcccgggagcggccaaggcttgcggcgttcctggcgcatcaggaaaattcggggacttcggcaacggcgatgacggcggcggcggcgctcaggcgggaatgggtcatggtcaggaaccagcccgtgacgccctgctcccgggccgtcactccggcagtgccgtgcagcaggatggagggagcgcccgcatcattgcgcaccacctccacatccgtaaaagcgcatttttcccctattcccgttcccagggccttcgccacggcctccttggccgcaaaacgggccgccagacgcggcacggggtccgcatgcttccggcagtaggcccattcatccggggtgcagatgcgcagggcaaacgcctccccgtttttctggagggcctggcgcacgcggtccaggtcgatcaaatccattcccaatcctgcaatgcggctcatgttcctgcaaccgggggttaaagttgaaacgggaatatcagctcaggcggtcaatcgcctggcgcatttccctcacggcctgctccatccccacaaagagggcgcgggctacgatcgtatggcctatgttcagctcatgcaggtaaggcacgccgtccatcagctgttccagattctggtagttgatgccatggcctgcattcacctggatgcccagggagtgggccagctccgcggcgcgtttcaaacgggccagctccgccgtgcgttccttccctgcgtggttggcaaagcatccggtatgaagctccaccatgggcgctcccagacgggcggcggcgtccacctgagccagctccggatcaatgaacaggctcacctgaatgccgttgtcagccattcttgccatggtgggggccagttccttttcatgaaagacggcgtccaggccgccttccgtagtaatttcctcacgcttttccgggaccatgcagacatagtccggtttcagccgaagggcaaagtccaccatctccggggtattccccatttccaggttcaggggaagggccacgctctcacggacgctcagggcgtccgcatcctgcatgtggcggcggtccccccggacatggagggtgatggaatccgccccgcccctttgcgccgcataagcggcgtccaaaacactcggctccacgttgaaggaatcaagcatggtcgcatagcgggcctgcctcagcgtggcgatgtggtctatatttacacctagcaacatatcggttttaagacaaggggacggggccgatcattcaaattaatggaggaaatggcggtggcccgtgaacaccatggcgatgcccgcggcgtccgcggcggcgatcacttcctcgtcccggatggaaccgccgggctggatgcaggcggtggctccggcgtcaatggctacctggaggccgtccgcgaacgggaacatggcgtctgacgccaccacgctgcccttcaggtccaggccggcctgtccggccttccagacggcaatgcgggcggaatccacccggctcatctgcccggcgccgatgccgagcgtgcggtccgtgccgccgaagacgatggcgttggagtgcacctgcttcacgacgcgccagttgaagcgcatggcggtcagttcttcctcggtcggggggcgcttggtcaccaccttggcttccagattgtccaggcccatcacgtccgtatcccgcttcatggtcatgaagccgccgggagcggagcggatgatgggttcgcggcgcgccttcatccaggcttccgtgttcatgcggatgatgcggcagtttttcttcttctggagaagggcgcgggcttccgcatcgtattccggggcgatgatgacgtccgtgaaaatggcgctcagcacgcgggccaggccttccgtcatcggacggttgaccacgatcacgccgccgaagggggcctgcgtgtccgtttcaaaggctttctgccaggcgttgcgcaggtcttcgtcatcctggcccacgccgcaggggttcgtgtgcttcaggatgcccaccgtcgggcggcggaactgggtgatcagctcggcggcgccttcgatgtccagcacgttcgtgtaggaaagctccttgccctggagctggttgaaaatgtccccgaagctgccgtacaggctggcttcctggtgggggttgtccccgtagcgcagttcctggtacaggggcgcgcagatgcagaagctgcccttggtgctttccgcgctctggtggcccaggtagttggtgatggcgttgtcgtaattggaggtgcgcatgaacaccttcactgccaggttttcgcgggttttcagggtcgtgtctcccttgtgggtctgcatttcatccagaatgcgcgcgtagtccgcgggatcggacacgacggtgacggaggcgtagttcttggcggcggaacggagcatggacgggccgccgatgtcgatcttttcaatcgcttcctccagcgtgacgtccggcttggcgacggtttcctcaaaggggtacaggttcacgcagaccaggtcaatgggcttgatgccgttttccttcgcctggcgcacatgctcttcattgtcgcggcggtgcagcaggcccccgtgcaccatggggtgaagcgtcttcaggcgtccttcaaacaattccggttccccggtatagtcggaaatttcaatcaccggaaggcccaggcctttcaggaaagcggcggtgccgccggtggaaataagctctactccaaactcgtgcaggcccttggcaaactcctccaggccggtcttgtcggaaacggatatcaatgcgcgctgaatagccataagatcaaatatctgtaatgtacccgcgggcgaaccctcctctccgggagcgaacgcgacaaatgcggttcctttccctacatactaccgccccgtgaagcaagcgcaatgtcacctatcatgacagccggggggattttttcctcccaaaacataaaaaaacgccctttttatcgctcttgtcttgacattcgggcgaatacttactacttcaaccgctcacaaataaccatttctttttagccatggcaacgatggaagtaattctcgcaacaaaaattgaaggactcggcgcggaagccgacctggtgaccgttaaggctggctatggccgcaactacctcatcccccaaggtctcgcccacgaagcaacggcctccaaccgccgtttcatcgccaatcttcaggccgcccgcgccaagcgtgaagcggaagaactcagcgccgcccaggaagtggccgccaaaatcaacggattgaccgtagaccttacccttgaagtgggtcagggcggcaaggcgttcggcgccatcaccaaccagaacattcacgatgccctgaccgctcagggagtggaagtggaccgccgcgcgattgagcttgaaaagccgatcaagagcgaaggcgaacacgaagtcgccatcaaggtgcatccccaggtggaagccacgctcaaggtggtcgtcaaggaaaacgcctaagcggcgcgcatccctttcttttttccggcaggcccggttcccaccttgggaaccgggcctctttttgtcaccctttttacttcccttccctgtacaaacaaggcatcatgcccgcgttgggtgtcactcgacatcatgcacggcatcgttccatccccccaccgaaatcaacggcatgattcgactctatcgtcaaaccccggaaggcattgagcgcaccacccaggtggatgcggctgaacagaacttggactccgtcttctggattgacctccttacccctgaaccggcggaaatcaagtttgtggaacgcctctgcgggctggagatgcccacctacgacgagatgagggaaattgaggccaccagccgcctgtacacggaagacggcgcccgcttcatgaccaccacggtcctcagccgcgtggatacggaatccccctccctgtcggaaatcaccttcgtcctcatgggggccaagatcatcaccatccgccattcggactcctattccttccgcgtcttctcccaccagctcctgcgccagaagcagatcagccgggaccaggttttcaccggactgctggaaaccatcgtggaccgccaggcggacgtcctggaacgcttcggcgcggaactggaccgcctttccaaaaacatcttccgcagggacgagccggaaggcaaggccagcaagcgcgtgcccgtctccagcgccctgcgcctcacgctccaggacctgggccgcgtgggggacctgctcacccgccagcgggactgcctggtcaaccttctgcgcctgctcacgtacgccagcaatgaagaggccctggacgacaccaactccaccctgtacatcaagctgcgccccctgagccgcgacgtcacgtccctctcggaatacgccaactttctttccagcaacgtgaacttcatgctggacgccgttctgggcctcatcaacatcgagcagaacgaaatcgtcaaaatcttcaccgtggcggccgtggtcttcatgccccccaccctcatcgccagcatctacggaatgaacttctcccacatgcccggcctggaaaacgaatacggctattacatctccctggtcgtcatgctcgtttccatcattcttcccctggtttatttcaggagcaggcgcctgctttgaacggcccctgccacggactccctccctctctttttgtcaaccactcctaccgtttcatgattgatatggactccaaaatcacccgcctgattgaacaggcctccgtcattgtcggcgccctcccctacctccaggcctaccgggacaagacattcctcatcaaagtcggcggcagcgccatggacgacgcccgcctggtcaagaagctcatgcgcgacatcgttctgctggaagtcctgggcttcaaccccgtgatcgtccacggcggcggcaaggccatctccaaggccatggcggaagccgggctggaggcccgcttcatcaacggtctgcgcgtcacgacgccggaagccatttccatcgtggaacgcaccctctccggaaccatcaatcccggcctcgtccagatgttccgcgactacggaggcaagggcgtaggcattcccggcacggaaatcttcgtgggggaacgcatccaggagaaggacgaacagggcaaccccgtggacatcggggaagtgggcaacgtcatcggctgcctgacggaccgcatcacggaagcgctggaactccagatcacccccatcgtctcccccctggcgaaagagctgggcacccacaagccgctcaacgtgaacgcggacttggcggcggcggcccttgccaaggagctcaagccggtcaagcttatctacatttccgacgttcccggcatcatgaaggaccccgcggacccgtccaccctcatcaaatccgtcacgcgcacggaagccctggacctcattgaagacggcaccgtttccggcggcatgattcccaaaatccactccgccattgacgccctgaacgcgggcgtgcgcaaggtgcacttcattgacggacgcctgccccacaccctgctgctggaaatcttcactccggacggcatcggtacggaagtcatcagggaacagcgctgaccacccgccgccatgcgccttttcctccttcttccggccctctcactggcggcggcctcctgctccatgcagcccactccgtccagcctttccggctcctggacccagcccgtccccggacagccggggcacgtgcagggaatgcagctcctgccggacggcagggcgagatccatcaacatgcgcacgcttctctaccggagctggcaactggacggcaagcgcctgaccctgacggggaaaagcataggcaacgggaactcctccctcttcaccacaacctccaccattgacagactcagcagaactacgctgattctaaacagggacggaaaccgggaggcctacacccgcacgccggtcgcggccggaaggtaagcatcccgccgccttccgctattcatcctccagaagggacttgttggccgctttcgccagctcgcaattcgggcatttgtcaatcaggcggtccatcagggcctcaatgcgggcgtccttcgccatcaactgctcatccttcttcttgagcaggttcagcgtataattcacggcaatcgtcagaacgcccaggccgccgatggctccagcggaagatacggccgtatctgcggaaatattgcccaggatcgtcgtgcacccgcctatggaaaacaagcacttagctatggaaaaattcatcatgggttccgtctagcaaaccgcttccccgtctgcatcacgcccaatccgtccacatccgccgcgcggcacgcctgggcggcacggcgcggcagccaaattcccgccgaatacactcggagaaaacgcgctccccctcccccggaaaggcgctattgccggggaacacggtccaccggacccgcgcagggagcaaggccgcgcggcgcgggaaaaatacttatacccgttgccgcatttccttcttcggctttgcggtgtttgtgctaaagtggcgccaatctgcccggtccggggctcttaccaatacttcacttcatccaatagaaagacacaaacatcatgcatatggcggacggcttcatttcaccggcggtaggctgcaccatgtgggcggcttccgccgcgatcacggcgctctgcgcgcgcaaggtcaggcaggaaaaggaagtgcggctcgtcccgctcatgggcgttctgggagccttcatcttcgcctgccagatgctgaacttcaccattccgggcaccgggtccagcggccatctgggcggcggcctcatcctggcggtcctgctggggccgtatgcgggcttcctggtcatggcggccatcctggcggtgcaggcgcttttctttgcggacggagggctgctggccctgggctgcaacatcttcaacatgggcttcttctcctgcctggtagcctaccccttcatttacaggcccctggccgggaaaaaccccggcacgggccgaatcacgctggccagcatcaccgccgccgtcatcgggctccagctgggggccttctccgtcgtgctggaaacgacggcctccggcatctccgcgctgcccttcgcccagttcgtggaactgatgcttcccatccatctggccatcggcgtggtggaaggactcgccacggcggccatcgtcatctttatcagtcgggcccagccctccctgctgcgcccggctgatctggaaaccggccccgtcaaaaaagcctccttcaccgttctgggcatctttgcggtaacggccctgctctgcggggcggccctttcctggttcgcctccgcctacccggacggcctggaatggtccgtggccggcgtcaccgggtcggaagaaaccagcctggcggagccttcctccctccaccgcagcctggaatccgtacaggcatccaccgccatcatgccggactacgccctccccgccgcggaggaaacagcctcctccggagagacggagggagcctcctccatcgtcaaccctgaaaccagcctggccggcgtgctggggagcgtcatcattgccgccctggtctttgcggccggctacctgttcggcagaaaaccgcacagccactgcccccgctgaccccccatgcccctgttcacggacgccgcgcggcaattccgccagatggaccggttttcctgcggaaacaccggattccaccgtctggacgcccgtattaaaataggggccttcctcgtctttcaaatctgcgtgctctcctggccgccgcaggaaatcacggggctgctgcccttcttcctgttcccggtctgcgtcatccgcatggcggggctccccctgggctacctgctgaagcgcaccctgtggctgctgcccgtcgccgtcatgatcggcatcttcaatccgctggtggacaggacgccggcgggagaatggttcggcattcccgtcacacagggcatcatctccttcatctccatcatcctgcggtgcatgctcaccatcctgggagccttcacgctgctggcctccacgggcttcgctccgctctgccggggcctgaggcagctcggcgcgccgcgcatcctgatcacgctcctggccttcctgtaccggtacgccttcatcctgatggatgaattccagaacatgctgatggcgttccgctcccggcggggaggctccgggtccgtccccctttccacctggggggccatgaccggccagctcctgctgcgcaccttcgggcgcgcggaacgcatttaccaggccgtcctgtgccggggaggggaagaccctgaattcgtcagcgcccccggcgtcatcaccatgcgcggcgtggcgggcggcattctcttctgcgccctcgtcatcctgttccgctgctttaacgtcaccatgctggcgggccagtgcgcccgcagcctcctctcatgagccaccaccttgtagaaaccatcgacctgtgcttcagctacccggattctcctccggcgctgaaccgcgtctccctgcgcatcacccacggggaatccgttgccgtcgtgggcgggaacggagcgggaaaatccaccctgctcctgcacctcaacggcctgctggagccctcctccggacaggtgcgggtaggggacatccccgtcacgcccaaaaccgtcgcccgcgtccgggaaagcgtgggaatggtattccagcaggcggacgaccagcttttcatgcctactgtccgggaggacgtggccttcggcccgctcaacatgggcctccctccggaagaagtcagccgccgcgtgcggcaggctctgcgggacgtccatgcggaaaccctggcggacaagatgacccaccacctttccggcggggaaaaacgcgccgtctccatcgccactgtcctctccatgaccccggacatcctggttctggacgaacccagcgcgaacctggacccggcctcccgccgcaccctcatcagcctcctgctccaattctcccataccaaaatcatcgccacccatgacctggacatggtcatggacctgtgcacccgctgcatcgtgatgaaggatggctccattctggcggacgcgcccgttccggacattttcgccgactgcgctttgctggaagaagcgcgcctggaacaacccctcagctaccgcctgatgcagtacggcagggagagggagaactccggccaattttaaggaggaaaaactccttacacaaactccagacgggcatccggcagggacttgatgaaccgcgccccgtacctcttggtggctacgcgggggtccagaatcaccaccatgccggaatcgctcctggtgcggatcagccgccccaccccctgccgcagcttcagaatggctacgggcacggaatactcgtaaaacgggtttcccccgcgcgccctgatgctctcaaagcgggactccaccagcgggtggtccggcacctcaaacggcaggcgcgtcacgatcacgttggaaagggcctccccgggcacgtccaccccggtccagaaactgtccgtgccgaagagcacgctgttcacatccttccggaacgcctccagcatggcatgccgctgcatgtcctgcccctgcacgtacaaggtccatccctgttcctcacagaacgggcgcaccttttccgccacctgcaccatcagccggtagctggtgaacagcacgaaggccctgccgcgggattccgccagataccttttaatccactccggcagcacttccgcatactccggctggtccggctccggcatggagcgggccacgatcagcctcatctgctcccggtaattgaacggactgcctatctggagcttccggacgctttccgcacccacgcgccccgcaaagtagcccatgtccgcatcccccgtccccagcgtagcggaggtcagaatggcggaacgcccggcggaaaacaggcgctccctcaggatatcgcccacctccacgggggcggagcacacgctcatgttccttccctccggaccggaccgctccgcccagtacacgtgcccctcctccgtcatgtccatcagcaccttcagggaggcctgcgcctcctccatgcgggcggccatgtccgccagctcgtccttcacggccacgttttcctcctgcttcgcgccctccctcttcaattctccgatcaattccgccagaggcagggaaagaatgtcctgggaccattccggctggaaaatgcggacaatcttgccggagcccgcaaatcccaggtcatcccgcgcattctggaaaaacaggcctgaagcgtcaatcacgtcctgcacccgctggaacagggccggattgttcagcggtttcagcaggcccttgtgcgtgcgcggattgaacatccgcagcagttcataattgagatgcggttccgagagctgcacgcccagctgccgggcggcgatgttctcaatcatgtgggcctcgtccagaaccacgaaatccccgggaaaaacgaaccccgcctcctcggaatcctccgcctgggccatcaggccgaaaaacagggtatggttcagcaccaccaccttggcctccagcaccctcttgcgggccacttggtacggacaggaggggccgcaatggcgcatgctgcacgcatgcggttcactgcacaccatggcccataccttgggagacggacggaacgccatgtcgctcagggtgccgtcctgcgttctcagcgcccagtcctgaatccgcgtcagctccgcggcttccccctgcgtaaacagggaatccatctgggccagcgcgcgccgcaggcgggtatggcacaggtaattctgcctgcctttcagcagggcggcggaaaaatcaatccccagggcggcgcgcagcagcggaatatccttgttgaacaactgctcctgcaaattgatggtatgcgtggaaatgaccgctttccggtcaaaatccagagcaaacttcacggccggcagcagatagcccagggacttgcctacgcccgttccggcctccaccagcagcggggcgtccacctggagagccctcgctacggccagggccatattctgctgctccgcccggtattcaaaatccctggcgcgggagaacaacccgtccggggcaaatgcccggtggacataagcctcaaaggcgctaacgccttccacgtcatctgccccggcgccattcatacgggaacgctcccctactggcccacgggaagctggcgggaggaaaccggcggcagattcaccttttccggcaggtcatagaacatggagcgcagggcattcgcattcatcttggaagcatcaatgaacgtccagggccccttgtccttcaaatccttcaccagcaccagaacgcctgtattctctatctttacaggcatcccgtccggacgcttcatggaaatgaccatccgcgtggggagcaccaccagcacctcgtctccattcttcaccagatgttccgccgtaggctggcctatttcatacgtctccaccaccatgccgcgctctttcatcacggcggcggctccctgcatcttttccctcatggtcttcatgaaggcggcctcccctcccgggaaggaagaaacaagctgcttcttcatgggagcgtacatcttctcaatcatccacatcatgtcccccgttttcaccgctccggaaagctcccgggcggcctggacggcgctgtctccgtattcaccggcctggacggcgcacacagccgccaccatcacacctgcaaacaaacttttaatcatggacggagtgtaacggcatgcatcccccgccgtcaaggcaaggcctcctgcacaaccatgtttttaccgggcgccctcccgcatcacaagcccggaccacatccacagcgtggggtccagttcccgcgcggcgtcctccatcaacttgcgggccgcttcttcatcctccgccacggcgaacatggtggagccggagccggacatcatggcgccgcgcacgccgggcctctccagcagccatcgcttcatctccgccaggaacaaatgcttctcaaacacgggcctttccagatcgttgaccagcacatggccgtccacccgctgctccccgtacggtatgcccggcaattcccctgaaccggaccagcggcggtaggcgtccggcgtggaaacgccgaacgacggcttcagcagaacgatccgggggcgccattccctccattccggcaggggctccaccttttccccgcgtccggtgcagcggcacgccattccataaatgaaaaatcccacatcggaaccgatctccccggccagctccgccagacgcctccgggacaggccgccgtgttccagctcattcagggcggacagcacgcacgcggcgtcgctgctgccgccgcccagccccgcgccatggggcacgttcttgaccaggcgcacatgccacggcatgggccgtcccagctcccgctccatcagccggcccgccttcatgaccaggttgctttcatccagcggaactcccggggcgtcgcagctcatttccaggccgtccgccgggaaaaactccagcacgtcgcacaattccaggggaaccatcacggtatccacttcatggaaaccgtccgccctcttacccagaacgcggagggaaacgttcactttgcacggagccttgcaactgatcatacgccatggattccaccaagggacggcctccgggtcaagcccccattgggcgcaaatggacgggcacgcattttttcttcgcaaattccgggggctccgctataataggcgtgaccccgctgcacatggcctacgacgaaaacagcattaaaaccctggactggagggagcatatccgcatgcgtccggggatgtacatcggcaaactgggcgacggaacctctccggatgacggcatttacgtcctgctgaaggaagtcattgacaactcgattgacgaattcgtcatgggcttcggcaaaaaaatcaccattgacgtgactccggacggcctgtgcgaggtgcgcgacttcggacgcggcattccgctgggcaaactgctggactgcgccgcgaaaatcaataccggagccaagtacgacagcgacgccttcaagaaatccgtagggcttaacggcgtaggcatcaaggcggtgaacgccctttccgacttttttgaaatccaggcctaccgcgacggggaaacgcgctcctaccagttctgccgcgggaaggaactccccaaaggacggaaggacggcgccacggaggagcccaacggcacccgcacggcgttccacgcagacccggacattttccccgtaaccacgcagttccgtccggaatacattgaaaaaatgtgccggtactactcctacctcaacaaggggctggccctgcacttcaacggacgccgctacgtctccaaaaacggcctgctggacctgcttacggaggcaatgagcgaggaaccgctataccccatcatccatctggaagggcacgacatcgaggtggccttcacccatggcggccagtatggggaggagcactactccttcgtcaacgggcagcacaccacgcaggggggcacccaccaggcggccttccgggaggccatcgtcaaaaccctgagggactttttcaaaaaaaactatgaggctggggacatccgttcctccctcgtggccgccatctccatcaaggtaaaggaacccgtcttcgaatcccagaccaagaccaagctgggatccaataccatcagcccggaaggggaaaccatccgcaccttcgtaggcaacttcatcgccagggagctggacaactacctgcacaaaaacccggagacggccaaagccctggaagccaagatcaaagactccgagcgggaccgcaaggaactctccggcatccagaagctggcgaaggaaaacgcccgcaaggccaaaatccacaacaagaacctccgggactgccgcgtgcactacaactccaagcacgcccgcgcgggggaaaccaccctgttcatcacggaaggcatctccgcctccggctccatcaccacggcgcgggatgcggaaatccaggcggtcttctccctgcgcggcaagccgctgaactccttcggcatgagccgcaaggtcgtctatgaaaacgaagaattcaacttcctccagcacgccctgaacattgaaaacgggctggaagacctgcgctacgacaaggtggtcatcgccacggacgccgatgatgacggcatgcacatccgcatcctgctgatgaccttcttcatccagttcttcccggagctgatccgggagggccacctcttcatcctccaaactcccctcttccgcgtgcgcaacaagcagcagaccatttactgctactcggacgcggagcgggaagcggccatcgccctgctgggcaaaaacccggaaataacgcggttcaagggcctgggcgaaatctccccccaggaattcaaggccttcatcggggaaggaatgcgcctggaccgcgttcgcctggaagactcacacaaggtgaaggacctgctctccttctacatgggcaaaaacacgagggaaagacaggaatacatcctgaaaaacttgcgtgttgaactggacccggtcatggactagagtagcggagccacatctatctatgcttaccattcccaaggaaaaactgccggttcatattgcctgcatcatggacggcaacggccgctgggcgcacagccgccatctgccgcgccaggccggccaccgggcgggagcggatacggtggagcgctgtgtggacttctgcattgaccatgatattccctggctcacgctttacgccttctcctcggaaaactggaaccgccccaagacggaggtgcacgcgctgatgctgctgctgcacgaattcctgaaaaaacgcctcagccagatgcaggaaaaaggcgtgcgccttcacgccataggcgacctttcacgccttcccaagcgaacccagaaactgctgcaatccagcctggaagccacggcgggaaataccaggctcaacctggttctggccctctcctacggcagcagggcggaaattgccgccgccgccagaaaaatcgcggagaaagcctcccgcggggaactccacccggacgccgtcacggaagacctcttcaaccagcatctggacactgccggcatgccggaaccggacctgctcatccgcacctccggggaaatgcgcgtctccaacttcctgctgtggcagatcagctatgcggaactctatgtaacggaaacgctgtggccggacttcagcaaccgtgacatggaagcggcgctgctggactactcccgcagaaaacgccgcttcggcgcactttgaccccttttttaaaccacattcctacggaatcgccatgaaccaatacgctctcattctggccggcggcagcggcacccgtttctggcccctctcccgcgaccaccgtcccaagcagctcctgaacatgttcggggaaggcaccctcctccgccaggccatcgacaggctggacggcctggtgccccggcagaacatcttcatcctgaccaaccacctgcaggaggcggaagtgcgccgccaggcccacgacatccccgtggacaacatcatctccgaacccgtgcgccgggacacggcgcccgccatcgccctgggcataggcctcatcaaggcggcggacccgcacggggtcatgcttgtcatcccttccgaccagctcatccaggaccaggcgtccttccgctccctgatgaaagccgccatggacacggcggcgcgggaaaaggcgctcgtcaccgtgggcatcaagcccacctggccctgcccctcctacggctacattgaacgcgggaaggaaatcgcctccgcaccgggctgctcctgccgcgaagtcatccaattccgcgaaaagcctgacacggccacggccgccgcctacctgagccagggcaacttctgctggaacgctggcatgttcgtctggagcattccaaccgtgtgcgaacagcttgacaagcactgcccggagctggcctccttcgtggagcacatcgcggaatccccggacccgcaggaaaccatccgggaggaattcccggcgctcacgcccatctccatcgacttcgcgctgatggaaaacgcggaccgggtgctgaacattgaagccacctttgactgggacgacgtaggctcctggatatccgtagccaactatctggaaacccacaacaaaaacaccaccaatacggacatcaccgtgcaggacgcctccggcaacatcgtcttctcccagcggggggacaagcacgtggccctgctgggcgtggaaaacctgatcgtggtggaaacggcggacgccatcctgattgcggataaaaacaaggcggacgaaattaaaaaaatcgtcaaccagcttccggacgaactcagatgaccagccagcatccggccctgggcattgactacggagaagcccgaatcggcatcgccgccacggaccccgtgggcatcatggcgcaccctgtggaaaccatccacaggcacaaaacggacggcgtcacccgcatcgtccagctcgtccaggagcgggggatacgcaccctggtgctgggcatccctgtccgcatggacggcacggaaggaaccgccgccgccagggtgcgcgcgttcggcagggaactggccgccgcccttcccggccttcccatggtattcatggatgaatgcctcaccaccgtcatcgcccaggaaaaactgcacgccgccggcaaaaaggagaaaagcttccgccccatcatcgaccaggtggccgccgtggaaatcctcaacacgtggcttgattccacgctgggctgaaacggcaaacggcgccgtgccgcggcgcaatccctgctttacgcgcctacggaactccgcacttccctcttcctcagcaggaccgttccgccggcaagcagaaacgccatcagccacagggcccggcgcgtttccggccaccagatgaagctatccgccacacgggcgtcttccgggcgttccggcgggtagcagaccgtcacccggtcccccctggaataggaagaccagaaaagaaaagcgggggactggaataccacttccccctccccggtctgcggcaggaaccgcacttccggcgcccagacgtccagagagggaccggacgtccccatgacccgcgaacggctccacaacttcaccgtatcctccgtgatgttccgcaccgtcccttccgtacacaggccctcccgggcaaaacggctcttttccagaaaaaaatcaccggcctgccatatggaataaaggctcagccccgccatcacccaggccagcagccaataccaaccgaaccacggaacgctgaaaaaatccctccagcgctccgcagcccgggaaaacgaaaactctctccccccatgcatcaggcacgctccatgctcagcaccaccttgccgctgcggaactcttcctgggccttctccacggcccggcgcacgtcgctcaacggataaacggtatccacggcctgcttcagcctgccgtccgccatcaggcgcgccagcttgtcataagcggcctcaatctccggaacgggggcattcttgagccactgcgtcacccacaggccttccaatttaatgcccttgaaaatcaggaaaccgttcggcaccttgatgctcttcctgctcatggcgccgtacgtcaccatgcttccgccgggagccagcatgtccatcaggcgcagggcgctttccccgcccacggcgttggaggccagcacgggcctctttccgtccagccgggccagggtattcttcaccacatcctcgtcatcctctcccactaccaggtcggcgcccagcgcggtcaattcatccctcaattcatccggccttcttacaaaattcaccgtcttcacgcccatctcccgggccagttgaataatgcaccttcccacgccggaattggaggcgttctgcaccacccagtcccccggagtcagggaaacgaacccttccagcatgcgcagggcggtcagggggttcaccttcagcatggccgcctgcacgggatccaccttcacggggagcttcatcacgttcacggcaggaaccgccacatactcgctccaggaacccacgccgcgcagcagaatcacttcatcgtccttgcggaagccttctgcgcgggactcctgcaccacgccgcagccttccagtccggcgcgtgaatggggcagcacgggcttcacgccgtaaacgccctgcacaaaattgatgtccgccggattgatcggggccgccttcatccggatcagcacctccccctcctccggaaccggcatgggaccggaaacatactccagcacgtcctggggtttcatgctgcattcggaaaactctgcataatgattctcactcatgctttcaatctctcacgccgcctccctccgtgcaagcgccggatacgttttacacgggcaaacaagccatccggccgcgcgcgcctttccccggcgcctgcccccccggccatgaacggagggaaccagaccgcaggaaagcccggcagcgctgccgccgggccggcacaaattccgagtcttttgttcggttgttcttgaccttaggcgaaaatacgctagactatctctctcgcattaacaaataacttcgattgccatgtcccgaatttgcatcatcagaggtaccatgcctcacaaaggtcgtcgtatccatcgctccggtcttgccaagaaaaagggcggtattggtcgtcacgtcactaagactgtcaatcgtaccgttttccccaaccttcaggaaaagcgcatctgggttcccgaactcggtcaattcgtgaaaatgaagatttccgccaaggccctgcgtacgatcaacaagaacggtgcttacaacactcttaaaaaggtaggtctcctgtaaaaaagattcttttttttgaacgttgttacaccacttgaactctaaggcttcaacgaggtgagcaactggcagaaaaagatgtccaaaaagacaagggatcatctgcttaagtgaggcgcctccaagttgaaggttttattgaaacattaatataccaacggacgtaaataagacgtcccctactggaaaaagatcacacagatgaaagcccaaaccaaaatcgctcttagaattaatgatgacaaccccaaccatcacctgtggaacaacaggggagtttggtggtgccacgtcacggttcacaagcctgactccacggcggaacgcctgagattctctctgaagacccgtgacatcgaaaaagcccgcgcccgccgcgacaagattttcgcctccatccagcagcacttcggcatcgccgcttaaggaagctgtacggagagattaaggcaagtcacatcaatctctttataagaaccgttccggttaaccggaacggttcttttttatggaaaaaataaagactttcactcggaaagggcggcagcggatttgccgcaacacaagccccctgcaaacaaggctgaaacagcccgtttcttaaagccgccgccccgccaggctattcttgcaaagccggctatccatttcaccctttattcctataataatggacaggcggtgaaacgcggcattcacggacccgctggccggcaaaaaaagatgccgtccttgaaagcatccattcctgcccctgccgtcaattctttttgctgaaccggaacatggccgctccatggctgttcaactccacggccatatctcccttcaccgttccctggtcggcgcgtttccagaggtccctggcttcatacgcgccggagagccccagctccctcaggttcaccttcactacgcccttctctttcccggtattgaaaaaccccgccgctacggaaccgtcggacagctccttcgtccagacctggaaatccccccggtgccacgccttgcgggcgggacgggcggcagggtcctggtccacggcaatcacctcgtcgttggtcaggagccccatcgtgaatgaatcgatatgctccaggtcacaggaaatgatgagcggggcggacaggaggcaccacaaggtcacatgggtgtactgttcatccggcgtcagctgcgtctggacaaacgtggtattgggctggttgggcttgcccagcttcccgatctggagaatgtccggatcattccagtggcccgggcgcatgtgcttctgccagcgttcctgggaaaagccgatgccgctgacgctgccccagtggtcctggatatcccccgtcgtcctccacaaattggccagcttccccagctcttccacctgtttatacggggcggcattggatatgctgagcacaatatcccgcccggaatcgtccagagcctggcggatgcgttccgtcgtcggcacgtcattggggttccagtccaccttcacgtaatcgaacccccagtccgcccattgcctggcgtcacggtcaaacagccagacggcgcctacacggtccgccttcctgcgatgcacgccggggtaactcccgaaaatttgattcttctgcttgcggtccttctccggaatggccatttccccgtaatccgccttcgcattgggcgagcttcctccgatgaacccggcatacgtccccatccagggcgtggaataaatgcccgccttcatccccatggcatgaatggaatcgcacatggccttcatgtccggaaagcgcttgttaggctggatggagaaattccgtccgcctcgctcgccctgccagcaatcgtcaatattgatataggtccagccatggttgacaagcccccgctccacaaaaagccgggccgtcttcagcacattctcctgccccacggcctcactgtaggaataccagctgctccaacccatgggcggggtcaggcacaactcatcccccaccttcagaatccactccttcgcatcttttccatgcctgttggaagcctggatcttcaccttgtattcccccttcttcgccggggcggtacccgtcaccagcccgcgcgaatccatcctcaggccggagggaagcccagccgcctgaatcttcatgggacgctccccggaaacgggaacctggaacagcacccgcgcgccgggagtggcgccaacaatgcgggcgccgttgacggagggggaaagcggggtttcaggagtcaggcgcacgccgggagggggagccggataaggattcgggaactccgtgccaaatgatgaggatacggcggcgccaagcacggcaggcaggaaaaaacggtacaatttcataaatggtctatggaggtgtaccttaaaaaacgcgtccgctcccccgtttctttcatcatgctgtctatctcggcctccgtgcgccatcctgttcctgcgttccttccgcaaaacgtgaggaactccggaaaaaagccgggacggacactcccggcaaccgtgccgccagggagcggaaatcctcttcacgcatcacgttccccgccgtcgccagggcatccgccagcgccgcggaaggcgcctgcacgctcacctgcctgccctccgtcatgcccagccccgtgcgggggtccagcacatgggaatactccgcaccgccgatcttcgccatctggcgggcgctcccggaggtggagacggcggcatggctcaacagcagcaccgtattcttcccattaccttcatccaccagcagccgccatccccgctcccccggtgggggggcgccggccataacgtcgctggtgctgtcaataaagaaggaacggattcctctttttctcaaaatctccgccatccggtccacggcaaaccccttgcccatgcctcccaggtccaccctcattccgggaaccgttttgaccgcggcccccttgccaacgtacagcttttcccatccggacgcccggcgcgcacgttccagttccccgccggacgggagaacgccgtggcggcggctcttcttccacaggcggatacagggaccgagcgtggggtcaaaggcgccctttgtcagccgggcataatccagggccagcagaagagccttttccagctccagggaaacggggacggaaacgccgttttccgcggcattcaaccgggccagaccgctccccgcatccatggcggacatcaccttctcccagcggacggcgcaggcaagagactccatgcaggccttctccgtctgcgccgcatccatcccgtgcccgggataggcgcgcaccgtaaacaccgttcccatggccgtaccccgcaccgttacccttccatccggagcatgaacgcaggaaagcggctccggcggggcggaagccgtttccctctcctgcccccggcttgtccccgcagcagccagcaggcaggaacagcacgcagaaacaacggccagccggaaaaaagaactcatgcgcacctgcgggatcatgttccaaaacctactccgcacaaacaaacaggagcaaggaccgagtgcgccatggagacgccgtcatcccatccgctgacaaaaccgggatgacgttatttcatttgaagctggcgcacgccccccttttcatgataaatggaacggttccacgttcttgcaaattttcccctcttcatcgtcatgaccagattcctgctctccctgtggcttcttttaacgcttcccgtttccgccagctggtacggtgacgaagtaaaagccggttccgacatcatcatggtggacctgctctacccctactggccggaatccacctacttttcctgctggaacctggacatgttccccaagggcggctacttctatgccggcgtggcggccaacgccaacgacaacacgaacctggaaacctaccgcccctccaccgtatggtccttctggcccgctcccgtttacgaagggcggcaggtgcgcaacgtgtacgtcaatccgcacgtctacgcccagcaatacgtgggtgaaggagcttccggaaaggccggggggcgcgacgtcccgtggatcaagaccaagcagtggtacaccatgctcatgcggacctggggcgcggacgaagccaggaaggaatgctacgccggctggtggatgaaagaccaggccggcaaccggtggcaccacatcgccaccttccgcattccctatgcggccaccggcttcaaggggaacggcggctttctggaggacttcgggcacgggggccgcaagcagagggaactgtggcgcggcaagggcttctacaggcacaacggcgcgtgggaaaaatgtgataccgtttccatcaacgttcccaaggaaggaggcatgaaatacagcggctggacggtccaccagacggaaaacgactccatcctgaccatgtcctatacggaaaacaggcaatttcccagaaacctggagccgggccgcaagcacacgttcaagctgaaccagccggacaagcccgtgatggacgccatcgcggcggaaggcaacgcgcgccacgacggcagccaggtgatcgtggactggacgctggcggaaacgtcctccccgcagttcgggtacaagatagaggtctttgacaatccgcaatactccggaactcccatttacacggtggaggaacaaatcccgcacgtacgcaccaaagctgtcgcgctcccccgggacatcccccaatgcttcgtcaggctcaccatcacggacatctttgaccagcagaaaaccctgaaactcgccaaggccgctgcggaaactcccctcaaaaggctgcccggcaaaaaagacctgtccagcggactggaatacaaatacctggaaaacaaggacggatggtccaaactggcggaactggacttctccaagccgttgcggaccggcgtctcccatggatttgacacggccctgcgcggagccagggaaggacgattcgcctttgaatatgaaggcttcctggtcgtcccccagacgggggcctacaccttcgccctccaaacctgtgacggaagccgcctggacgtcggcggaaaaaccgttattgacaacgacggactgcacagcacgtcggaaaggcgcgcctccgtctttctggaaaaaggcgtcactcccatcaagctgacctacttcaagaaaaagccggaacacgaattcaccgtggcgtgggtgggctggcagtatggcaaccgccccatggaggaaataccgctcgccagcctcatgcgccccaaacgggcggacataccggaagccaggctggaagtgggcggcaagggaccggaacgcgtgctgaaaacagccatctcctccggacgggtgaacaaggtggaatactacaacggcgccaagctggccgccgccgcggacgcagcccccttcaccgctcccctcatgctctttgacggagaaaacaaactgtgggcgcgcgtcttctacaacggttcccatacggtggacacccccgtcgtccccgtccattcccagagccgcatcacccccggctgggaagccatgctgcgcggggaaccggggctgccccactccatcagcggcgcgggaaacgcctttcgcttcgtgggggaaggggaatacctggtcagcaaaaaaatcaagggtgacttcatgctgacggcccacatcagctccatcagcgacaaggcgctggacaccggggacgactgctgggccggcatcatggtgcgcaaggacacgggagccaccaactacgacgatgaaatcgccgtcttccggactgtgggccgcggcctccggtgcagcgcggacttcagcgactacggaacggggcgccaatccaccttcaccctgaacaaggaccactcctgggtgcgcatcatgcggcgcggcaatgaattcacctgcttcacctccccggacatgaaaaaatgggaaatgggcatgcagcgcatcatcccgatgaaggaggaagccatcgccggcatcacgttcaggaccattccgggcaagggcaagggcatcttctccgccgccatggacggaatctccatcaaacccgtcaaactccagccgcacaagataaccgccgccatgcctgccggaaaaatcatcggctactccctgctctccccggatctggcggtggtgcgctaccgttccggagcggacctgctggaacgcaaaaacggaacctacgcccgcaagcccctcacactgcccaggggcgtcaaaaccgtccgttccatggcgcttgccggggacaaaatgttcctgctggcccccacctcccagggaggagccctgttcagcagcaaggatatgggtaaaacgtggaccgtcgccaacccggatgtaaaagtggacccgtcccccatctccttcattgccggggagctcatctccgtcaatccccggaatccgcgggaaatcatcgtcggttcggaccgcgccggactcttcatgagcacggacggcggagacacctggaacaacgtgggcctggtgggggaacccgtcaccaacgtcggcttccatacgaccgcccaggccaggattggagccgtgacggcggaccgcaaggccaacaccagcaaaatcttcatctccaccaacaacgggaagaaatggaaccagaaaaacgaagtgcagggagcgggattcctgagactggtgtacgacacccgcgccgcagaccagctctacgtcttctccacccagggcgtttacacctccttcaatgactgccgcaccatgaaccgtgtgctccaggggctgcccgtcacacagcccacgctggcgatcgacaggcgccgcctggacgataccttcatgctcgccgtcccgctggacggcaagggcgtgtactccagcgaacgcaacgccagaaactggcagaagcgttccgacaaggaagactggggagccgccttcaacctgctgattgacaccgcgaacaacaggcacattaccctgtacgcggaaaaaggcatctatgaaagcacggacgaaggcaaaacctggaaacaggtctatccgggccattgaaccagaatgctctccttcttctcccatgaacacaggcactccggcgcggggcgttccctgcaacgccagaggagctcatgcagttctctcattttctccgccctggcgagcgtttccgccgaccttaacaagctccgcttccgggcgccgggcggctttcctctgaaaccggacggattacgccatcctaggcaggaacagcctccatgcggctttccccatcacaatcatgcgcgcagccgcagtgcttcccgcactgcggcctgacaaaatctgcccgggaacgcctccttatctggcaaacagggcatggatgcggcggcagacctcatccacgttctcccgtgaattgaatgcggaaatgcggaagaacccttcccccctggaaccaaagccggaaccgggcgtaatgaccacattagcctcatacagcatcttgtcaaacatctgccagctatccaggccgtccggacactgcacccagacatacggggcgttttcccctccccacacgcgcatgcccgcctggcggcaggcattcagcagcagcgcggcattccccaggtaatggctgatcagcacggcggtctgcgccatgccttccagcgtaaacagggccgcggctccccgctggacgatgtaggaagctccgttgaacttcgtgctggtgcggcggctccacagctggctgatgagaaccttgttccccccggaatcatggccgtgcagctccttgggaatcaccacgtagccgcagcgcacccccgtgaagcccccctgcttggaaaaggagcggaactcaatggcgcaatcccgcgcgccgggaatttcaaaaatggacttgggaacggcggaatcctgtataaatgcctcatacgcggaatcgtacaaaataatggcgtggttcgcccgggcatactccacccatttcagcaattcattccgggaagccacggccccggtagggttgttcgggaagcacaggtaaatcaaatccacatgctcatccggcaattgcggcacaaaattgttctccggcgtgcaggggaggtacaccagtccctcatacgaaccgtccgcgctggaatccccggtattcccggccatcacattggtatccacatacacgggataaaccgggtccggcacggcgatcctgttgcccggcccgaaaatgtccagaatgttgcccgtatcgcacttggcgccgtcagacacgtaaatctcatccacttccacatgcacgccgtggacctggtaggcctttttggcgatagcctccctcagccagaaatagccctgctccggaccgtagccgtgaaagcgctcatgggtggacaaatcgtccaccgcctcgtgcatggcttcaatggccgccatgggcagaggttccgtcacgtctccgatgccgcagcggatcagccttttggccgcctccggatgggactcggcaaacgcattcacgcggcgccctatttccgggaacaaatatcccgcctgcagcttgaggaagttatcgttaatattaggcatggttttaatagtaagtgtctcattccataccctccacgggaaggaatcaaggccccgttccggcatggctcccctccctgcgtcactatctccgcacaccccttttcctgcggttccctccgcgcggacatggagccgctgcctatttgcgtttcatgctccgcatcaaactcttgtcttcccggctaacacgcagggattcaataattttttgcaaagccctgttgtaagtgaaatcggacagggacgaattcctcaaatactccagcgtcaatgctgggaacttcacataacagacggaaaccgcccaggccaccgccatgcccacgtaataatcctcatgccgcacgccatccagcagggccagcacctgctccacgtaatcctccgtaatgaaatgggccagcatcatcaccacggcaaagcggacatcatagacccgtgcggacgttaaatacggctggatgaactcccagaccagtgcaggatgctttttacaaaacttcaggctggtgcagaaagtatcgcagacagcccagttatccatgcggggcacgaagcgcgcggcctgttccaggcgctcttccggctccatgcgcgccagcgctatcagcatgccgtccagcatcacttcctccgcatacgggtcaacggctggattttccagcagctcccgccaattcccccccgccacctcgcgggcaaggttccggagaacggggagacgaacgcccagcagacggttgacgccgggaatcagggaagcggagaacttctgaaactccggttccgccaacgcctcaatcctttccctcaactgccgcctgctctcaatcatgggcgccatcctacatggaggctatgcgccgcacaagggggaattcccgtatgagaggcggcggaacccatgcggaatcccccttggaaggcccttccggagacgcgcctaaaaaggaattggcggcttcccgtcttctgtggtagcctgcggacaggcagcaagccgtcccctatgccctccagccttcaacaattcaaatgtcccggatgcggcactcccttttccgcggcggatgtggacaaccgccgggacacggtcacctgcagcagctgcggactttccaccccctggacgtccctggtccgggagcatgaattccatgatgtgcctgcggccccttccaggcatctgacggtaacatccgcccatggaaaagtcacgctcacctacaggcattcctttgccaaaatacttctttacacgggactggccgtggtttggggcatcatcaccctggtgctcgtcctcctgtccttcgggccggggaaaacggacttcgcgctgcccgtcttcaccaccttctttgccgtcacggaagccttcatcatcttcctctgcgttgacatgatgctgggaaaagccgttctccgggtggaaccgggtaaagcgtcccttttccggggcattggtccggtggggagcacatgggcttttctccttcccgcgcaggccccgatcatgatggagcgcaagggaggggaaaagacggactattgccgcatctccgtgccccagccttccggaaggccgttttacttttccggcggcatttcagacccggagactcttgaatacatcgccgccgttctgcgtcagtttcgcgcctgaacccggatttttcacggtcatgacgtggttccctggaacgaaaaaagccgttccatggtccaaaaaagacaataaaaaatcttatgatcatgaacgaactggaaatcatcgacgtccgcggccgcgaaattatcgattcgcggggcaatcccaccgtggaagtggacgtggccctggccggcggagccatcggacgcgcgtccgtccccagcggagcctccaccggggagcatgaagcctgggagctcagggacggggacgccaagcgctacggcggcaagggcgttctcaaggccgtggaaaacatcaacaagatcatcgcgccggaagtctccgggcacgatgccaccctccagccggccattgacaaaatcatgctcgacctggacggcacgcccaacaagtcccgcctgggggccaacgccatcctgggtgtttccctggccgtggcgaaggccgccgccatccagctcaatcttcccctcttcaaatacctgggcggcccgaacgccaaggtgcttcccgtcccgatgatgaacatcatcaacggaggcgctcattcggactcccccattgacttccaggaattcatgatcatgcccaaaggcgcgcccaccttccgggaagccctgcgctacggcgcggaagtcttccatgcgctcaaggacgtgctgcacgaccgcggcctgtccaccgccgtgggggatgaaggcggctttgccccttccctgaaatccgctgatgacgccctggaatgcatcgcccaggccgtgaaacgcgccggctacacgctgggcacggacatcttcattgccctggacgtggcttcctccgaattctacgacccttcccagaacctgtacgtcttcaagaaatcggacggccgcggcagaacggcggaggaactgacggcctactaccaggagctccagaaaaaataccccatcatctccattgaggacggctgcgcggaaaacgactggctgggctgggaacagctcaccaaagccatgggccacaatacccaattggtgggggacgacctcttcgtaacgaacgtggaattcctgaaccagggcatttcccgccatgtggcgaacgccgtgctggtgaaggtcaaccagatcggctctctgacggaaacgctggacacggtggaactggccaaggacaacaaatactccgccatcatctcccaccgctccggggaaacggaagacgccaccattgcggacattgccgtagcgaccaatgccgggcaaatcaaaaccggctccctgagccgttccgaccgcatggccaaatacaaccagctccttagaattgaagaggaactgggagatgacgcagtttatggtggcaaaatccacattttatgatcaaaaatgttttgtttaactgcaaagaatgctctggagacgccgctattaccatcgttttaccttggcggagcttgaaatccgccgggagaaacgtgccctgatcgtccagagggctctccgcctctttgccatcgtcctggccttgtgcctgaccatgctgctttccctggtgtgtttcaagccatggaaggacctgcgctccctggagcatgagcgttccttcctccaggcgcatctggaaaaatccagggagcagatggaacaggctaaaaacgaattcatctggatttcccaggacccccattattttgaaatgatcgctcgggacaagggcaacctggcccttcccggtgaacatatcctccgcatcgcggaacccaagcgcctgaaataaggcgcttttttaacgaaaaaacgggaccatgaaaaccatgtcccgtaccggtcaacggaacgttccagtccaaaccagggcgtttgatcccacccggcctccatccagcccggttatccgcagcgggataggggcagccacgggaatggcaaccatgccgcgcggcggaaagggacggttccgcatccccgctaccctgccggcaggcgccgctgcgtattgaccgcagcgcagggcccctggcgagacccaatgcggcctcattcaggctgtttgtccggcgtggccttgtcgtactccctcatcagcttggcggaccagctgatgctgtccgggaaacggcacgcgggcgtcgtggtcaggtacgttcccagcttcctggccagggaatccgcatcctggtgcctggaaaaatataaatccttctgctcctgggggtcatccgtaacgctgtaaaactgcggagcgcggtccggcaccagcaggtacttcatatccccgtccagcacggcggacgtataatccgtgcaccagaacaacgtgcgcggaacaggcgttcccctgttcgccaccagctccagaatatccatgccgtccagtttcttggggatttgacgtccgtttgccttcagcagggccggaagcaggtccacggtggaaacgggctgcttgcagacgcttccgggaatcagccgcttgtccgccggatacctgatgatgaaaggcacgcgcacgcccccctcaaaatgctgcctcttggcaccccggaaaggagcgttgcaggaagacgcttccggagcgccgccgttgtccgacaggaacacgacaatcgtgtccttttccagaccgtccttcttcaaggcatccagaatgcggcctattcccttgtccatcgcatacaccatggcgcaataaatccggcgttccttgtcctgcacgttcttgaatttggcgatgtcctccggtttggcttcgttgggccaatggggagcattgtaggaaacgaacatgaaaaacggctttttatccttgttggactcctggaggaactcaaccgccctgtccgtaatatcgtccgtcaggtaggtaatatccgtcttatccgtaaaattggacacaatcatggagggattcaggccttcagcctccttcttcacgggaaaataagaccgggaacctcccaggaacccccaccagcgcgtgaagccgcgttccggcggcgtatacccctgcgtgtggcccagatgccacttgccgaacaccgcgctccggtacccgcaaggcttcaaatactccggaatcagcttctccgtctggggcagcccgtaatgggactccggaaggtaatccacctggatattgggattcgtagtaatgccgtagcgcttcggaaaacggcccgtcagcagccccatgcgggaaggggagcacatcggcgccgttacatacgcccgggagcagaacacgccctccttcgccagccggtcaagggaaggcgttttaatctgcctggaccccgtgcagcccaaatccccgtaccccaggtcgtccgccagaatgaccaccatattcggcggagtggccgggcggctctgcgcccccgccgccccgcaaagcaaactgcacagaatcaacaatagatgcgctttcttcatcatacgttaatttacgcggcttgcctgccatatcaatcaaaatattaattctgaaatttccggggcaatcctgcaagcggcatccatgactctttaacaacgaatttgctaaaaacaggacgatttgcccatccaattatttcccggaaatggatacgaagcctttccttccgcgccgctcccacggacagacgccctcctgctgccggagaaacagctccatcaaggcgtttccaatccggcggcaataaaggccggctccccctgtcattccttcaccttccctggaatgccggaacagcagccctaccctctcatctgccgcagaagggccgccacatactgctgggcttccttctccgcaatacctgtaccgaactcgaacggcttgccgtccggttgttccactacaatcttgttcagcaccttattattctgctgtatattactcgcctcaatggaaatgcgggaatccttcgccagaagaaactgctggcggcggcccaggctcccaaccccgcggaacagctctcccgttccgggcgacagggtcagcgtcatacggccgaacaacacataaacggcacccaaaaacgtaccgaacccgaccagaacgaaaggaatcaggaacaattgcccgaataaactctcatgggccattttccccatcatcacaaatatggcggcgtatgtaatagcattccaaatcagtgcaaacagcaacaggaaaaatccggctcccttgggcttcctgtacgttacttccaatccccgtgccgtttttgtcacgctcatgcgccggggaatggaatcaaggatttcctcatccctttcctcctgaacaagctctgaaaacctgcttatcttgttgcaggcgcggcataaagccatatccgtggccatattcacatcttccatcgccagcaacgcgccgcacatcggacacttcaattcaacaggggtagtcatgcccggaattctaacaaacttttatgttcagaaaagcataaaaatcacagcgttaccggcctctccatccttcacaaaaataccgtttttccgggaacaagggatagacggctttaagttgtccggaaaggaaattccgtctgccttgggaaactgctgtccttaagcgtttgtcctgcttcacggctttaccttctgcgcatccttaggcattcccttgtacaaaaattccgtggccggagtacgccccaccgtccggttgatcaagtccgggatttccttgtccgcatagcccgccatccggaggtagttctttaccgccccgctctggcccggaaacaggttcaccagcatttccacaaaatacttcattctgggaacggaaatataattttttaaccttttattcctgatattgtttactgccagcttgttgagaaagacgtaatactggggattgacattgcaaacgatatcacgtttcttgagttcttcttccaaatacttccggtttaacggaacgaacgattttttcagagcctcgtgcttctcctccaaatccggatcgtaacggttccggaactgcgcatagatggaagccgcataagtggccagcaagtcggacagcgtcttgccccggagatggaggcggcgcgccatcggagaggcgtcacggctcatcacgtagaggaaggaaaacatgtcatgtttgacggcatgatcattattgtcaaaaatgctctccggcgtcgccttgtcgtagtcggcgggataaaggggagtttccgcgatataatagaacagccagagctgcaacgccagctcctcccgcgtgatctgcttattgctaacagaagcgcattggcccagcacggagcgtgcctctgtataaaactcccccagccgcccttgcgccagcttctcccgcaagccggacagctccgcagggggagatttaaacgggtccaggcacaccggggaaggcagggcatgtcccagccctaccatacagcatagcatggcgagaaaggtaaacactttcattggattatttccaaacatattcataattcattagatgatagcataaatcataggatatggcgcgaccgaatttcctgatggcaatttggacttcttcaaattctccttccattccttcgaatttcacatactcaaccttgaacctctgctccacggtttccactttgaggatatcgtcactggtcgactctttgccgcctttcccatcatggactttccaatcgcaagtccaaaaccattcctgcggcaacttagctccatgtatggcgttataatttgccatatatatcacccggtcaatgaatgaattattttgttcaatgctcctggggtcatcgcatccatgctccgtatgcgggacgcccaattttatttcatgtttttgcggatcgggaggaggggtcggcatgacataggtcaatcctccatcgcgttcaatcagttggatatttccaaaattcacctccgtaggttccaccgtcaatttaacatcagcagccacaataatgatattgtgatcactgggaagatcggccttgacgggaacaactgccgtcagctttgtcggtacaagaatctcaaaggcaatggttttttccaggccttcactcgtggtgacggtgacttccacctctcccttcttttgtattctcttattcaccgtcaatgtaacctcttcgagcccctcggttttttcgggaagagaggcaagagcttctcctttggtaatcttccactgcaactgagaaacatcccccttgggctttccggtcaaagtcaacaaaacatcttcccccatgccgagttttttgcgctccttgtccgtcttctcatccacatcctttccctgctctttggcaatatagaaatcggcagaacacaacgtcgtttccgattttatttccagtgcctgtacttcatcaggaacatcttctccggcctgggcaaaagcgccaaaccagtggcccatcaatatcaggccgatagaacgtatttgaaatagagacaacatggcaaggaggggaagttggcatatcgttgccttatccgggtaatttatttatttgaagatgtaaagaaaaagttgaaaatactaatcgtactccatgaattaccaagctatttcccctatttttcccggaacgccattctcttttccgcaaaaaacggcggcttccgccatgcggaggacgccggaacgttccggttaccggacaaactgccggttcaagcatcccaacacccgaatatcaggcgctgaattggccgcctatgctgaccgtatcaaactccacgatcttcacaataatgttttccgccgtgtccgcctcccgctgccggatggcatccagcaggtcgtcatgcagcttcatggccccggcgtcatactgcttctcctgcagcaggccttccagattctcctgcacatggcggatcaccacgttgtacaattccgcaagcaccgggttatgcgtggcacgggccacggcagcgtgaaacagcatgtcgtcctcaatgcccggccttaccctggcatggcagtccttcagggcgctttccagctccttcaaatcctcctccgtccttttaacggcggccagccgcgcaatctccttttccaaagccagccgcgcttccagaatctggggcagttcggattccttgaggcggttgctcaccgcaacggcaaagcggtctgatgccatcacatacgtgccgtcgccgggccgggcctccagcatccccatgtgaatcagggattgaagggcctcgcggatggtgttgtggctgacggaaaaagcccgggccagttccgcctccgcgggaatgcggtcccccaccttccacttgccggaccgtatcatggattccatggcggtgagcacctggcgggacagggacactcttacaggcttcttcaactccattgtcttggatttcttcatgaaaagttagcgaataacagtccagaggcgtcccttctccgtcttgatcaactggatatccagttcaaaggcgtcctttagattttcctccgtcaacacctcgtcccggcttccgtgggccacgatctcaccggactttaaaatcatgccgcggttgaatacggggaggatgtcttcaatacgctgggtaatgaacacgatggtcaggtcaggccgcgtctccgccagttcctcaatggttttcagtaaaaattcgcgtcccgccaggtccaggtaaacgctgggttcgtccaggatcatcagctccgggttcgtcatcagcgcccgtgcaatgagcaccttgacctgttctccggaagacatggccaccacgggcctgtccatcaaatgctgcgccttcagggatttcatgatcccggcggctttctcttcctcttccggcgtcggctcccgcagaaggccaatagtgccgtcagggccggaaagcaccatgtcgcgcccgttccaggcgccgtcctccagccatttgtgcatgaacgggctcacccacgcgatggacttgcgcagttccagcagattaacgtgcccgaaggtcttgcccagcacctgtactctggcgccgaaaagaggccatgcaaaccccatcagcaccttgaccagcgtcgtctttccggcaccgttcgcgcccaggatgaagcagcgttctccgcgctgcacctgccaggaaatattgtgcaggatttcgtggccgcccaggtataccctggcattctccacattgacggccggcaaggaattgtccataaactgaaaaaatagcgggcttccgcggaaagcccgggagtgtccgggccgttcctccgggatacggcggaacggcccgtgatcaacgtaaaagaaaccttagtttctttcaaacaagctgcgaatcttggcgcccacgatttccaccgggtgctggcccagggcttcacgcttggccttgaggctgggagcgcccttggcggcttcttccagccagtccttggcgaacttgccggattcaatgcgcttgagagattccttcatgcgttccttcacgtcggcgggcagaatctgcgggccgttgtagtactcgccagattcagcggtgttggaaatcacggagttcatcttctggatgccgccgttgtaaatcaggtccacgatgagcttggcttcatgcacgcattcaaagtaggccatttccggcggataaccggcttccgtcagggtttcaaagccgtacttcatcaggtccaccaggccgccgcacagcacgttctgttcgccgaacaggtcttcgtacgtttcctgggccatggtgcattccagcacgccgccgcgggtcagaccctcagccttggccatggcgagagccacgtcgcgggccttgccggagggattctggtgcacggcgatgaggccggggcagccgaagccttcttcaaacacgcggcgcacttccgtgcccggtcccttgggagccaccatgatcacgtccacgtccgcgggggggacgatggtgttgaacacgtaggcaaagccgtgggagcagcaaagcgtcttgccggccttcaggtggggcttgatttcagcttcatacacggagccgtggctttcatccggcagcagaatgtggatgatgtccgccttgtccgcggcttccgctacggtcatcacctggaacccgtcctgggtggcggcgtcaaaagacttgccggggcgaacgccgataatcacgttcacaccggagtcacgcatgcaaagtgcctgggcgcggccctgggcgccatatccgatcacggcaacggtcttgccgttcaatgcgctgagatcagcggcgttgtcatgaataatatccattgttactccttctttaagtaattcatccaaacatccaatgtttggatgaatgagaacatagccatccgccgcccgattgcaagcgcttttcaacgaatggctgcgttttttaaattatgtgcatggagacgggcccgctggagggaagagcttgaaagcaggagaatgaagaaaggaaggagcccatgggggcgcttacgggatattcctgacaagggccatgaaaccgctttgcggccgggcagccttcatggatgaacctgttccggaatacagcggaggcatttttacaagggccggaaggcccttgttcctggcggatgcccagcgggaaacacggagaaaatacgccttcccccgaactgggtgaaaacatccctggcagtaaaggcgtttttccacaaaggagcttggctcttccataaagccgttatccctaccccgcactcccatttcaagaacggtatccctcacagatcccgcccaatgccattatccgtggaagccagggaattggagtaaatcagctgggaggtatcataccccagttcctccgcgcaatggagcatcggctgaagctcttcatccctcaactgcggcgtccgggccagcagccacaggtaattcagggaaccgccggaaaccacggcgcggctgtaatcctcatccagaaaggccacttcataccggccgtacaccagcggcacgaagtacactttcaaatgattgggggcgtctcccaccacagccttcgcatgagcctccttccgttccccggtacggacgtcataaccgctgttggtaacggaaatggtaccgttctctccatggtcataccgggcaagcaccttgcgaagcccgcgctcaaaccaattttccaggcgcgcgatttcgtgccattcccccagataacgttccagattgaaatccggcatggggtcggttttgacggaatggccgtgaaacagggaagtaacgatggtctgtatgatactcatgatttgacagggaatgctttgttaaaaaaggtgcggatatccggatattgaaactcaaatccctcccgcatcagcgtctccggaatggcgcactgcccgttggtaatcacctgggaggcttcccccatcagcaggcgcaggacggcgtccggaacatggatggacaggcgggtgtggaaatgttctgcggcagccttgtaaaattcccggttggtggtgcgttccggagccgttacattgaccgggccggaaatgtcctccttccccatgatgaaaatcagggcatccaccaggtcctccagcgccacccaggaaaagggatggtccgggttccctaccgccgccgtgatgccgaaccgggccgggcgcaccattctggggagtgctcctccatccggggaaaggactacgccaaaccgggtgcggaccagccgcacggagtcgttcaccagttccgcctccttttcccaggccacgcacaattccgccagaaaggaatccgccgccggatcgtcctgttcgccatggcagccgccggccgggctgtaatacccgacggcggaagtggaaatcatcacttccggaggttcgtgcaggcgattgaccgcttccaccagcttgcgggtggtcataatgcggctctccaccagttcctgcttgtaagcgtccgtccaccgccggtcgatgggcgccccggccagattgatgacagcgtggcatcccgccagagcctccgccaggcaatccacgctgtcctgcgtgaacagatagcgccacaaaggcgtcacctgatgcccgaacaccgcaagacggctggacaagtggctgcctataaatccgctggaacccgtaatggctacattcatgactgtaaatcagatggcggcccgtctccgcggagggcgctccggaacactgctggaaatatcccgcacgggaacggacaacctttaccggataagacatttccacctctctcctccgttcagcggaggacatactttgccgccttccttttcctgaaacgcgctcttcaccggaatttcccctgcggccggacggaaaaagagaacttgattttcaccgggtgccttttatgttggaaaccgtcacaaccactactctctcatgaataaaactcccagaactttcctttccctgctcattcccgccattgtcatcattgctgcgggtgcggcggccttctccttttacaatttcagcaacaagcgcgtgctgtccggttttgccggctacgtctattccaagcccattttcggccagaacaagtttgagggcatcctgatcgggccatcctccacgggatgggtatggcggagggaagtcagcaaggtttccatcacgccggataccacggtggaggaattcgatgcccgcaacggcggcgccatcctgggcaaggacaaactgcccatctcctgcaaggcctccctggtttaccgcctggacccgtcccgagtgaaggaattcatggaggattacggcggcatcgcgcagagctccggccgcaatgacgacgaagtggcggacgagatcatgctctttgcctacaagaatttcatccagcagcccttccgcaccgccgtacgggcggaattgagccagtacaacgccctggacgcctccggcagcctgcaaaagatttccgacaacgtttacacgcagttgagcaagcgactggacggcacccccttcatcgtggattccgtagccgtgggagaaaccaatcctccgcaggccatcattgaatccgtcgtgaagaaagtgcagaccacccaggaaaatgaacggaaggagacggagctgcaaatcgcccggaaggacatcgccatccagcgcgcacgcggggaggcggaaggagccatgaaaatggaaatagcgcgccaggaagcgaacgctaatctggcacgcggcgaggcggaagccaaagtcatcgtcatgcaggggaaagcgcgcgcggaagcttccctggaagccgccagggcggaagcggcggggctggcgctgaaggaaaaggccatggggccgaacgtgctccgcgccaaggcctttgaaaacatgctgaacaatgccaaggtctatcttccctccggcaaggatgcggaagggaacatgtccgtgctgggcatcctcaatctggacagggagtccgccaaataagcctcactttccccggcgctgccggaacggcgacagtcatgaagcggcggaaccggagatggaaaaaccgccatcctcctcttccccggcaaattcatgcttgagcatgaacaagccgcacatgttcatcagcacgcaggcgacatacagcttcacgggcgccatggcaaaatccatcagaaacccggaaggaaggctcagaatcacccatccccccgcgcagatggcgccgagcagcccggcatagggaagaggcgcctttctgacaagcccccaccagcccgcgggagaaagcccggaaaaactttccagcacggaagtcctcatgaaaacgcccgggaaataagctgcacccgccgcaatgaacagccagataagggggctgtccatgtcccagtccatcactcccagataaatgaccagaggcaggaaggagactgccatgcacattaccagccggatgtaaggcatcatcagatcgtccagccattcctccaactccggaaagaggcagatttcctcctcccccatggcggaccgctgcaccatcttcatgaaaaaggcgcacatgaacggttgcaggaaacaaaaaatggcaatccagccgatgaggggcgcccaggccgccaggaacatggcccatacaatgaggacggcaaaggcaaaaaccatgggccttccacggaaaggatagcccagagaagagagatagtcggacattcaaaaatgttagagcagtccgttcacaccgtcaacgccttattgccgctctaacaaaatagttcctccttgtttcaggaataaaaattctccacggtccggacgacgcgctccatgtcctgcggcccgcagcgctggtccacgggaagcggcagaagatgcagcgccagcttccgttccaggctgccctccggggcctgttccagcacctccggccacagcaggggaaccaggatgcgttcatcaatcagcacattcctcagctcgggaaaagccgtccaaaacggatagcaaaatggagcggacaaggaatccggctccacggaaaggcggttcagatgtcccagcctttcgtgcagaaacaggaaattgtccatgcggcgcaatcgcgcctgctcgtaatcaattccgcgcattaaccgctccgtcagacgggacatcttacgcaggggggcgttttccagcctccgttcgttccgtccgcaggcggcggaagccctttccggcccacgttccaggcatcccagcagaaaggcggcatccggcagggactcatcccgttcctccggttccggcagcggctggtctgcatccatgacggcgattcccccgtccggaaggccggaaaacttgcgcggactgtacagggacgccacgccgggacgggcgggagaatacaaggccagcgcattgtccacaaccagcctgccgccataccgggaggccagccggtccacgtacttctccttgatgccgaagtagtttgtatacagcaggaattctccttcctccagctccggcaattcttccggttccagatgcccgtcaatgcggtaaggaataacgggaatgtgaagccgttccatcggttccagcaccgttccacatgtataaaggggcacgtggacacggcgcacgtcccccaggcggcgcaggatatactccaaagcgcgcctgccggaattcacggccacgctccggccgtgatgccactgagggaaattgccgtattccggcaattccaggccgaaaaagccgccgatgtccgtccgcccttccatacgtcacgcaatactacatctcccttacaaaggaaagagccatctggaacggcaccctttcccgtaccagggaaccaaccgaacacgactggaaggaaaaaatcaacaaggaatgaatctggagcatccgggagaaagccgccggacagcccggcagcaagcccttccacacaatctcctgatcccttcccctcattttgaacgaacaacactgaaataaaatcctgaccttatgccttcatcatttacactccacagcaaggacctgggcggcgttgccacgcctgtccaccggcacaccagcataggcggcggcaatcagtcccccgagctcttctggaccaatccgccggaaggaacaaaaagctttgccgttaccatccatgaccgggacgcgcctaccggaagcggattctggcactggctggccgtcaacattcccgcctccgtcagggaactgcacgcggatgccggaaatccggccacccgcctgatgccggagcaggcggtccaaattcgcaatgacgccggattcacgggctacagcggcagcttccctcccccgggccacgggtggcacctgtacctggtcaccgtttatgcgctggatacggcatccctgcccgtggctccggataccccggccgcccaggtaggcttccagctctggcagcacacgctggaaaaagcatccctcgtcttttacgaccaggtaccggcaaaataacctgtaccggagaaaatcaccgtttctaccgggcttccggcttggccgcctttccggcgcccatccaggttgcccggtgccacagcccttccagcaccccgtaacggtgccgctccagccaccagcggcagaaccatatctgcccggccatggcggcgcagccgattgcaaagctggccagatacccgcaataaggagccagccccagcgcgtacgggaagaaaatcagggagcctatcagggactgggagacatagttggtcaggctcatgcgtccataagtcagcagaggaaccgtcactttcctgaaatattccagccggtacaacaggacgaacccggctacccacacgccggtaaagcagacattgtgccacatggtgaacacggtgtgcaccggggcaggcaaatccggcagggacatcaccacataaaacgccacggctccggccagggaaagaagcatcccccgggtccagaacatggcattccggtcattctgcaaaaagaaatcctgccgccccagcacgaaccccagcagaaacagtcccggagcctgcatcaggcgccccgcctcaatgccccaggccaggcttgcccactgccccaccgtcaggttctcccacgccatcagccagaaattgcccgtatccacagccgttttcagggcagcgtacgattccgcaacagccagggagggaggcgcccagcccggattcacccactgcgctgccgcatacgcccattccaggggctgggccaggaagaacagggataataccaccagagtggaagtcttcagctggcggcacggcaccaggagcagccctgcgatggcgaaggtcagcagcacgtctccgcccggaaaaaacaccgcattcatgcaggcgaacaccgccagcaggcacatgcgccagacaaacctgcccgcaaagtcacggcccttccgggcctggttgcggtactggatggcaaaggtgaacccgaacaacagggcgaaaatggtgtaggactttccggcaaacaggaagaaaaaagcgtccttgaactgctggttggccgcctccatcaccggggaggaagccacgggataggaattgtagatgaaatgttccaggaaatgcagcagcatgattgccatcacggcaaaaccgcgcagggcgtccaccacataaatgcgtttgctgtcgggagagagtaagggttccatggctatgataatacggcgtacggaacgcctctgtttcaacagaagtcacctatacaccatgaaaaagccttttacagccaaaatcgcagccggagcatccttccggaaaatttattccatgccgggcggcggacgcgtccccccggccatggttgctgcgcggtcaaggacatatccgtgccatccccgcccttccgcattccggaaagctcaataccgcttcccagagatgagccggagaacgctcttccccctgccccggcagacaatgaaacccggtgcaggtaccccggcgctctctggaaacgggaacacctcagcacaaacggccgatatctgccatcaactcccgcacgtcttcctcccgcgtggcccagctcgtgcagaaacgcacggtactgtgggagggatcctcccggcgcaggtaggcaaagccgtacttcttccccaactcatccaggacggaatcgggcatcgtgacgaactgctggttcgtcccgctggcaacggggagcgccagtcccctggcgcggcagaaatcccggagcatcacggccagacggtccgcgtgggcccccaggcggaaataaaggccgtcacggaacagctccagaaactggatgcccagaagcctccctttcgcgagccggccgcccttctgcttggcaatgtagcggaaatcctccttcagggcatcatggcgcagcaccagggcttccccgaacagggcgccgaccttcgtgccgccgatgtaaaaggcgtcgcagagggaggcaattgccggcagatccagatcattgccttcatcgcacaagccgtagccgaggcgcgcgccgtccatatacaggtacagcccccggcggcggcagacttcggaaatctcctgaagttccctccgggaataaatggtccccagctccgtcggctgggaaatataaaccatccggggctgaggcatgtgttcatgggtttcgtcgtcccaatgggcgtgccacgcatcctcaatctgccgggccgtcagcttcccgtccagggatggaatggcggaaaccttgtggccgcacgcctccaccgctcccgactcatggacgttgatatggcctgcatccgcgcacagcacgcattgatgggggcgcaaggccgccgcaatcaccgtgaaattggtctgggttcctccaatgaggaaatgaatgtccaggtccgttctgccgcacaaattagcgatcagctcccgggcccggtcgcaataggggtcctccccatacccggctgtctgttccatattcgtttccgccagcctgcggagaatatccgcatgggcgccttcactgtagtcacagttgaaaagaatcattgccttcctgaaaaacgcggggactgtagcccggggcgcctgtcatgtaaaggaagatgaagaatacctccggaacaggggcaagccacgtcgcggttccggcggagggcggcagggcgcaagcggtttcacggcacagatgccggaggctcagccatcctccgctccgcccaggccgcttattccggcagcttcacccttttcagcgtaaactccatcttggaaatatccccgctggcttcctgaatgcgggaattggtgaaatacaggtacccgtcatgaatgctgaacgtgtccggccagctgattccgtccccggaagccagaaccttgatctccttgcggtccggagtgagatagacaatgcggttctcttccaggtcccccatgtaaaggttgccccggtcgtccatgatcatgccgtccggggaaggcgttttcatggaaaaaatcctgctttcatccaccttccggtcaatcagttggcgggtgggtattccatacagggttttacccgtcagggcgtggaaatacaggatgccgttcttccggtccagggcaatcccgtcggcatggacttttccgtcatgcctcttcccctcaacggtgacatggtcctgttccgccgtcgtataggggtgatggtccagcattcgataattctctccgctcttcatgtccaggacgatcaaccccggatcgttggaatccgtaaaataaattttgccatgctcacggtccacgcgcaggtcattaacataggaatccgggctggtggattccgccaggggatacttcctgacaagcttgtccgtattgaggtcatacacgtacaatgcaggaacggcgacagtcttgccgatcatgggattcttcgtatcaatcacataaagcctgtctccgtccgcaaccacggactgcacgcacacaaacgcatctccgtctccgggcattcccttctcccaccggttggttttctcatccggataaggggtatagctgccgtccttgcggacctccgccacggagcacggaatctgctcctgccagcggggaaaattgacaaaaatcctgcccttgtccgacaccgtcactccggtcacctgcgcccccttgaacgaggcgacgtcctcaatcttcgcctccgcacgcccggccggagcaaacgcgcacatgaggaataaaacaacggaagcggaaaagaaaaaacatttaacggggaacatgggattttaatctctctattgactgcaagacaatactgaggcgctccgcgttcattccccgcgggcgcagctttcctcgcagcaccactcccgtcatttgcaaaaaaatgccccgttttcccgcacctgatgccattttgaatggaaaccgttatccccaagaaaccagtaaggccgtgcaagcagttaacttgcacggccttgtttggtgcgcccgaaaggactcgaaccttcacgggggaacccccactagaacctgaatctagcgcgtctaccaattccgccacgagcgcacatggtttggtaagaacgggggttattatgcacagcggcggcggattggcaactattttcctgcacatgaaagaaaatattttccagggcctctttccccccggcaaccgggacggcatggaaacgatataagggcttctcaaatccttccgtatgcagtagtctcccctcagcatcagaggcaccaccatttcaggcttgtgaatgagacgagggaaaaaccgctattgaaccgttttgaggtcatggaaatggggttcggcctgtgtacgctggctgccctgatgtggctgctgtggtggaacggcttcggcgagattcatgaggaccagctttccctgcgttatttccgggaaatcctgtccctgctggtgctcggccagcttaccggagttctcggcatcctgcgggagaagtggcttgccaggtccatccggaacccgcggtggatggagctggggctgggcctccttatcctggtcatgctggccgggaattttttcaattccacctttatttccagaatagagcttcagaatattttccgcgccctctgcctctgctacggagcggctcccctgctgaacctgaaggagtattttttccgcctggcccgccggaaccgggggttccacctgccgcgcatccgcccggccctgcttttcctgctcacgctgattgccttcattacgctggggggaaccctcctcatgtcgcccggcgctaccaaggacggcatcattctttcccctacggacgcttatttcatcagcaccagcgccgtctgcgtcacggggctggtgcccctgaacgtccatgagcatttcaccaattacgggcagaccattttgctggtgcttttccaggtaggcgctttcggcatcatgacgttcacttatttcgtctccctgatggtgggccagggcctgagcctgcgttccaaggtgaccatcagcaacctgctggatgaagagggcatcgcccaggtggaccggttcatcaagaacatcattgccgtcacgttcggggtggaggcgctgggagccatagccctttatttttcctggaggaacgtaccggggctggagggggacacgctctggtggtacgccgtgttccattccgtttccggcttctgcaacgcagggttcagcctgtttgcggacaacctggctacgccggatgtggcctacaatatgggcggccagattaccatcatggtgatggtgctctgcggcagtctggggtttgcgatgtacctagagatcgtccgccgcgccagggtggccctgggctgggacagccggaacactatcagccgccactggtccacgtacagctggctggtcgtgcgcatgaccgccgcgctggtgctgggcggcggattgatcctgttcctgatcaaggcgattgacggcagcctgttcacttctgccgatccctggtactggattctgtgggaaagcctgttcaacgccacggcgcgcaccgccgggttcaatatttcagacatggcgctcaacagcgtcccgtacgccctgttcctgggggcgctcatgttcatcggcggcaatcccggttccacgacggggggcgtccataccaccgcgttcgccgtttcctgcggggaggtggcgcgcatcttgcagggcaagcaggacgtggtgatgcacaagcgccggattgcccgcagcgtggtggagcgcgccgtcatcaccgttatcctggccggggcctgggtaggcatgatgaccacggtcatgtgttttgcggaaccgggactgagcctggaacgcctgtttttcgaggtggtcagctccttcgccacggtaggtttttcctggaatgtcacgccggaactcagcgatgcgggcaaatggattatcgtgtttaacatgatcgtgggccgcgtgggcatggtggcattcgtgctggcgttcatgaaacagcccagcaagtctccgctgcggtatccggaaaccaggcttcccctcagctgacccgcggtttttctccgtttttcatgacatacatggagacaaacgcatttctttcttgcatgaaaacggtttgagccaagaatgccggacctttagcgcctgctcccggcagatcatgcccgcggaacgcccttgttatgaataatccctcctttatttcctatcaaaagatatggctcatgtcgtatcccctcatgatcagcctgatcattgagcacatgatcggcctgacggacgccattttcctgggccgcgtgggggatgtggcgctgggagcgtgcgccctgggcggcgtgtattacatggccatgttcatgctggctttcggcttcggcttcggggcgcagatcatcattgcgcgccgcaacggggaacgccgttacaaccgcattggacccaccatgatccagggctgttatttcatgctggccctggcggtggttctgttcaccgcctcccaatatttttcccccatcatcctgcgggatatcatcgagtccccgcaggtttacgacgccacggcggattacctgcactggcgcacctacggcatctttttctccttcctctgcgtgatgttccgcgcctattacgtggggattacccaaacgaagattctgacgatcaactccgtcgtgatgctcctgagcaacgtggtgctgaattactgcctcattttcgggaaaggcggctttcccgtcatgggcatcgccggggcggccattgcctccagcgtgtcggaggccgtttccctcctctttttcatcatttacacgggcacgacggcagacaagcggaagtacggcttccgccgggcgttcacgttccgtccccatctgctgaaaggcatgctgtccatttccggctggaccatggtgcaatccttcatttccgtctccatctggttcatctttttcctggcgattgaacatctgggggaacgccccctggccgtgaccaacatcgtgcgcaatatttccgcgctgctcatcatggtgatcagcgccttcgccaccacggcgggagccctcatcagcaaccagatcggcgcgggggaacagcgctatctgttcagaacctgcgggatgacgcttaacctgacgtatgccatcctggttccgctgcttgtcatcctgtgcctgttcccggaacccgttctcagagttttcacggataatccgtccctgattgccgccagcattaattccgtttatgtgatgtccacctccaccctgatcatggctccggcattcatcctgtttaatgccgtatccggcacgggcaacacgaaggcgggcttcatcatggagatgatttccctgactgtttacaccgccgccgtttattacatcgtcatcaggctcaagcctgacgtggctctctgctggttctccgaacacgtttacggcattgccctgatagcactggcgtggtggtacctgaagagcggaaaatggcgcggcaagaaggtataaacaggaatacggcaaaaacgcaacccttccctgcttttttccaccgtaaaaggcggcggcatccatccatgcccatgacgttccttgatgagagcggcatggatggaggagtgtccattccgccccagtcaagccaaccgggttcaacccgtttccctcatccatgtcccggataaaaaagtccggccattcacagacgccggaagaatagatcgattcgctcccattcaggaagaacctttaagcgtgaaacaggggttttccattctgcaaatcaggggaaaacgacgccagcgcatttccggaacggcctttcctaggagagcaccgccacctttcagaggtctttcccaagggcataaaaaagccccgcggcacaagccgcagggcaaaaacggaacaggccgggattattcttcgccggaatcctcttcggaatcacggtcttcctccggagaggaagctttttcctgctgctggggggcggccttctgggcgtgcttgcggcgggattcttccatcatgaagaattccgcgcaacggaaggcacggcgcgcggcttcacgcgccgtctggtcgtccatcagggcaagcccttcttcagacacttccgccaggaacattttccaggcgcgggaggccactttcttgccatccagctgcttgaaggaagcggagtcctgcatgggctggcggtcttctgagccgttgccctttttattgcggcggcgacgcttgcgcttgttgaaggaaccttcagaagctccgcccacggtttccggctgggcaaaggagtctccgccatgctgttcatggcgttcctgctgttccgggttgcggttggggcggaaggattcgcgcttgaccttgaccggagcggcagcctggggcctttgggaagcctcgggagcggtatttttttcaacgggagcggcgggagccggagtcacggaaggagccggcgcttcagcggcgggggccttcttgtcagccgcctttttggcgggtttcacggtttttgccttggccgcggttttcggggcggacttgaccgttttgattttgggcgcttctacggaagcggcgtcagcagcgggcttcttttcagccgcggcggccttcttggtcgtagaggccgtctttttggcagccgttttgcgggcagccatttttttggctgcggacgcttccggagcacctgtttctaatggtttttttgccataaaatttcaagtgaaagaaaggattatgaatcaattccggagattgtcgagatttatcacggagcctcatccggaagggccggcaaatctttcaaaagcgccttgtactttcccgaatcaaaggggcggccgcccaccaccatctcattaatggtgatggcaagggcctgcgccatcagttccagggcttcctgctcttccagtttttcccggcctgtcaggcgctccaggcaggccttgacataggcagtgtccggcgcttccagctgctcccgcacggcaggcaccagcgtttcaatcatttcatccggtatttccataagattttccttctgctgtttggattaccctaacgaagttcaggagaattttcccctgtccgcccctgaattgcgctgccaggatgccggctccgtaaaggtaatattaatttttcaataatttgattccaatgatcaatcctcgatttttgcctttaattcttctttcaattcagagggaatgtcattccagtgcaagttcagcaacgccccttccagagaatacaggtaataacatacaggcaccgtcttgtcaggatagttaccgcatatttttttaaatgcctcaacggaagtcattttctcaagatcagccaaggtgaacacaccgatttcattaaggcattcttttatagccgccccgatgttttttgcctgccttaaatcgcttgttatcttgaatttcatttttattgcggcttatttaccgtcatctcactttcgattccctcccggtttttttatcgcaacatggctgatgttccgggttgctgctccgttccatttccacagggatgcctgctgttttccctacatggcgcccatgcggctgcggatgacggattgcagctccgtttcaaattccctcaggtcatccgccgtgggttccccgagcgtggcgtcccagttgatgcggcccgtgcggtcgatgtcccacacgccctgggctccgctcctgaacagaatcttgccggccatcagggcatggggaggcgttatctcatccacggttacctgggttttacccagcagagaggcggggggagccgccgctccggaaagctccgccggctgctcggcctggggttccggttccggctgcctgatttgaatatccaggtcctgaagcaggaacctggtatccatgaatgtcagcttgatgcccaggtcttcatgcagcctcttctggatggcgtttaaatccagcccttcttccgcccagtcccggatggaccggacctgctccggagataattgatcagggttaatcatgatatgtatttgagttagaatgatgcctttttgttcgcggccagccatgcattccagcacggaatgaacgcgggggagaagtcctgcgggcggcgctccacccatgcctggatttgttccggcgtaaaccactgcacgctatccacttccgccgcgggaaaacgaactttcccggagtaccgcccttcatagagcgcgatgaattcccagccgttgttttcacctgcgtcaaagtccgcaattttccgcagctcgcagccggagatgcccagttcctccttcagctcccgcgccgcggcctccccatagctttccccggcatccagatgcccggcagcggaggaatcccacttgcccggctgcctgtccttccacagcgatcttttctggaggagcacagccccatgcttgttgaccaggaacatgtgcacggcgcggtggagaaggttcccttcatggatttcccggcgcgtgccctgccccgtcatctggttgagttcgtccaccacgtcaaacaattcgtccccgctctgcgccacgtccttgagggggttggcgtcgtaagcccgcgccagctccacccactgggccaaattcagttcctcggccctggcggaaggggaaagtcccagggaggcggctacttcctcccacggaggggacgccggaagctgttttttcaactgcttgcgcctctgggagaaagccttgcgcatcagctcgtccatcagccggtcgtcatacgggggcaggtcgcggacggggcgcggcgtgagcagcatcacggtggaatcaatccggggccggggatggaacgcttccgggggaatagttttcagggcgcggggaatccagtttttctggatgcgcagggacaacagcccgaaggcgtcgtcatccggagtcgccagaatgcggtcgatgaattccttctggagcatcaccacggcccgttccacggcgctgggcctggacaggaagttctggagaatggcgcctcccgcggaatagggaaggttgcccaggaacttgacgggagcttccgcaaacaatccccgcgggtcccaggacgcgccgtccgcatggtgaacctccacatgggggtctccggcccagcgctctttctggtattccgccaggcgggagtcgaattccaccagaatcaatttgcggcaaagaggggcggcgtgctccgtcagggctccggttccgggccctacttccaccacgcagtcctgtggctgaatttcaagctggcccacaatccagcgcgccacattttcatccgtcaggaagttctgtcccagggatttgctggggcgcacttcgtgatcttccagaacattcctgatctcggacggtttcataataaggggatgttctcaaaaatgcacatcaggagccagtaaaaagcggggcagtttccggcatgaaaacggaggcggcccgcacgccgccagaggaaagcgcccggaccatgcaaaggagccttgccccttgcgcaccggaacgggagcgttgccgccccatgcgtccggcatcctgcgcatgagcggcggcagacgtatcacaaattgacaaaaaggggaaaacatgtcacttttacaggtgtccagaacagtgacgcagcctgccgcaaaccggaagtttccgcaggttccggcgcgtacggacacccttgccggagaaaaggttgaaccggcccaacagcaatttgataagatcatgaaagtacttgtaaccggcggcgccggatatattggttcccacacggtgcgccagctcgtcaaaatcggcgctgacgtgactgtgctggacaacatggtgtacggccacatcggagccctcgtggacccggaggtgaaactggtcaagggcgacctgggagacgcctccgtcgtgtatcccctcctgatgaagggcggctttgacgccgtgattcactttgccgccttcatcaacgtaggcgagtccgtccaggaccccctcaagtactacatgaacaacatcgcccgtcccctcgtcctcctgggagccatgcaggccgccggcgtcaagcgcttcgtcttctcctccacctgcgccacgtacggcgtccccacccagattccgatcccggaaacggaaaagcaggatcccatcaatccttacggcagctccaagtacatgctggaaaaagtctgcaaggattgcgaccgcgcctggggcctcaaaagcgttttcctgcgctatttcaatgcctccggctgcagcgaggacggcctgatcggtgaagaccacgacccggaaacccacctcatccccaacatcctgctcacgctgaccggggaaaaggaatacatcgaagtcttcggcacggattacgatacgccggacggcacctgcatccgcgactacatccacgtcaacgacttggcggacgcccacctgagagcggtggactacctgatgaagggtggctccacggaatgcttcaatctgggaaccggcctggggctttccgtccgggaaatcctggaaacggctgaaaaagtcaccggcaggaaaatccccgtccgctacggtccgcgccgcgaaggagacccgccccgcctgattgccaatcccaagaaggccagggaaatcctcggctgggaagcccggtgcaaggacgccggagccatcgtggaaacagcctggaagtggatgaccggtccgcgccacggccactattgattccctttcctgccttaaaggatcattccctttccgccctgccatgcagcccatggcagggcttttttcgcaaaacgaacggcatccggctttttccatggtcagcctgtgcagggaaaacacgcgcctgaacatgcgggacattccttccgtattccccagccttcttcatccgcacccgggacagcccatgctccggcccgcaaacaaaaccaggaaacgctcctccccagcccggacgactcccataaaactcgtaaaccgctcaccataaaacaccgttttattcatatctggtcatcatgcagaccagaggaatattaacatctttgcactcgccccaaccggaaaaaacgttatattattctcaggaacctcccttactgcatgagtctgcacattgaaagtaccgaagacgcccttgcggaattgaagaaacagcgcgtcaagacgctgaccgccgccatttccgtctccttcctcggcgtcgccctcatgggccttctcctttatttggtgcatatcatcgtcgccattccggaagatccccccatggtggcctacgccacccaggaaggcgacaatccggatatcgacaccccggaagtcacccagaccacccagcgccccagcagctcctccactgccgcgcaggtgaaagtgattgccgccgtagccacggcggacgtcgcggtggtcaacccggacattgaagtggacgtcccctcggaagagctttccatgggcatcgacatcggcgacggcttcgggaccggcacgggcgacggggacgggggcggcattcccggcatcatctccaagcgctgcgacctgaacgaccgcatgaagcgcatcacggaaaacgggggcactccccagtgcgaggaagccgtggtcaaatccctcaagtggctccagaagcagcagaacaaggacggctcctggggcgggactccccagaattacaagtgcgccatgacgggcctggccctgctctcctacctggcccactgcgagacccctctttcggaagacttcggggagaccgtcctgaagggcatctccttcctcgtggaccagggcgtgaagaatcccgtcatttccctggtgccccagagaaacgaggtcagctatgaccacgccgtagccacctacgccctgtgcgaggcctacaccttctgcaagcagatggacattccctccatcgccaacctggaaaaagtcgtcatcaaggccgtggacaagattctggacaaccagaacgtcgatggcggctgggcctacaattacaacacgaaggcaggcgcccacacggacctttccgtcaccggctggaacgtgcaggccctgaaggccgcggagcacggcggcatccgccccaccaagggggaaatacgcacggccctgcgcaaggcggcctcctattgccgcaagtgcggcaagcccgacggcctcttcacctatatgcaggaaggccgggaagacgctacggcccgcccctccctggtgggcgtgggcgtgctttccctgcaaatgtgcggcaacggctcggacagcacggcgcgcaaggggctggactggatgctcaagaataccaaccagccgttcaactggaaggccaacaacacttcctccaacctctaccagcattactacggggtgcaggcggccatgaaccgcggcggcgacgtctggaaggcttacaacagggccttccgtgactccaccctcggcgcccaggcctccgacgggagctttgccccgaacggcttccccgggccggggggcctcgtgaacaccaacgggggcagcatcaacgacaagatttaccgccagtgcctcgccacgctgatgctggaggtgtattaccgctttctccccgggacgggagaaggcaccaagaattcctaatctgattgacagaccggcgcgtctggttttagtatgctgccagcctcgtaaacaggcaggccagcagcatctacctgcaaccgggcaattctccccatttttcaaggatgcgggagcttttgccgttgcaccaaccagacacgtccctctatgagtctccacattgaaagtaccgaagacgcccttgcggaattgaagaaacagcgcgtcaagacgctgaccgccgccatttccgtctccttcctcggcgtcgccctcatgggccttctcctttatttggtgcatatcatcgtcgccattccggaagatccccccatggtggcctacgccacccaggaaggcgacaatccggatatcgacaccccggaagtcacccagaccacccagcgccccagcagctcctccactgccgcgcaggtgaaagtgattgccgccgtagccacggcggacgtcgcggtggtcaacccggacattgaagtggacgtcccctcggaagagctttccatgggcatcgacatcggcgacggcttcgggaccggcacgggcgacggggacgggggcggcattcccggcattctttccaagcgctgcgacttgaacgaccgcatgaagcgcatcgcggaaaacggcggcaccccgcagtgcgaggaagccgtggtcaagtccctccgctggcttaaaaaacagcagaacggcaacggctcctggggtgaaggccagttccgcgcctccatgaccggcatctccctgctggcctacctggcccactgcgagacccccctttccgaggaattcggggaaaacgtcctgaagggcatctccttcctggtagacctgggaatgaaaaatcccgtcatctcggaacagcccgccttgaaggaaatctgctatgaccacgccgtagccacctacgccctgtgcgaggcctacaccttctgcaagcagatggacattccctccatcgccaatctggaaaaagtcgtcatcaaggccgtggacaggatcattgacgcccagtgccccaacggaggctgggcctacagctacaacaataagatcaatccggacatcgacctttccgtcaccggctggaacgtgcaggccctgaaggccgcggagcacggcggcatcaagcccaccaagggggatatccgctccacgctgcgcaaggcctcaagctacgtgcgcaagaatgtgatgccggacggcaagttcgcctacaaggaaaacggcaacatgccccgctcctccctggtaggcgtgggcgtgctttccctgcaaatgacgggcaacggttctgacagcgccgcccgcaaggggctggactggatcaagaacaacgtcaagaccctccagtggggccagggcagcggcacggaaaacgtcaagagcaacctttacatgcactactactgcgtgcaggcggccatgaaccgcggcggagacgtctggacctcctacaacaaagcgttccgggacgccgtgctcagcggccagaatgcggacggcagcttccggaagaacgatgtgggttacgtttccggcatgaccggcaagtctgaaaacatctaccgccagtgcctggctacgctgatgctggaaacctattaccgcttcctgcccggtacgggtgaaggcaccaagaattcctgacgaaattcaccggctttttcgcagccctctttccttcccgggaaagggggcttttcatatccctcgcgcggaacgggaggccgcttttcttccgccaagggtatttccaagccttcttaagtaacattttaataacaacatgctaaatataagtatattataaattttaaacttgtacctgcgcactcttggggagatggtggaatcctaatcaaaccccattccttccatgagcctgcatattgaaagtacagaagaagcccttgcggcactgaaacaacagcgcgttaaaaacctggccgcggcggtctccgtctccgccctcggcgtcgccatgacgggcctcctgctctacctggcaaatatcatcacgttccttccggaaccgccttccatcattacctatccattggaaaaccagggaccggaggaacccgacacacccgaactcgtcaggaaagccacacgcccttccaattcacctgccggccagcaggtgaaagtcattgcctccagcacccccctgcatattgccgtgcccattccggatttggaacaggatgctcccacggaagagtttttcacaggtattgaaatcggagacggaatcgcgttcgacgacggagaaggcccgggatgggacaaaccggatacagacgtcctttccaagcgctgcgacctgaacgaccgcatgaagcgcatcacggaaaacggaggcaccccgcagtgcgaggaagccgtggtcaaatccctcaagtggctccagaagcagcagaacagggacggctcctggggggacggcccccagaattacaagtgcgccatgaccgggctctccctgctctcctatctggcccactgcgaaacacctctttccgaggacttcggcgatactgtcctgaagggcatctccttcctggtggaccagggaatgaaatcccccgtcatctccctggtgccgcaaatgaacgaggtcagctatgaccacgccatcgccacctatgccctgtgcgaggcctacaccttctgcaagcaaatggacattccctccatcgccaacctggagcaagtcgtcaccaaggccgtggaccagattatgaaggggcagaatgccaacggcggctgggcctacaattacaacacccagcccggagcccacacggacctttccgtcaccggctggaacgtgcaggccctgaaggcagccgaacacggcggcatcaaaccttccaggggagagatacgcgcggccctgcggaaggcggccatgtactgccgcaaaaccgcccttccggacggcctcttttcctaccaggaaaacggccgggaaccacgggcctccctggtgggcgtgggcgtgctttccctgcaaatgtgcggcagcggctcggacagcacggcacgcaaggggctggactggatgctcaagaataccaaccagccgttcaactggaaggccaacaacacttcctccaatctctaccagcattactacggggtgcaggcggccatgaaccgcggcggtgacgtctggaaggcttacaacagggccttccgtgattccaccctcggcgcccaggcctccgacgggagctttatgcccaacggcttcggaggtcccggcggagtggtgcagaccagccagaaccggcatgccaacgatagaatttaccgccagtgcctggctacgctgatgctggaggtgtattaccgcttcctccccggcacgggggaaggcgccaggaatttctgaaccgcacggcgctccctccacacaacgggaagagagccgccggaggcaggccccgcacacgggggatacgccttcttccggcggcgcgcatgttaaatcctgacttgaccgcggcgtcttctcttgttattcatacggtttccattttccaacgacgtgaataacaattcttccatccttttcggcctttttgacgaatttctttggatccggtgctccggacgcggaagtttcgccaacagcccgaccgtcaaatccctgggggatgattacatcgcttccggaggacgcctgatcgtcattgacctggaaacctgctccggcattgactccaccttcatgggcactcttgcgggactgtcgcgccggctgctgcccatcggcggctccgtccagatcgcctcccccagcgaacgctgcctgagcgcgctggaaagcctgggactggacgccctgctcagcattgaaccgcctacagccccctggagggggaaagtggaccagatacgcgccagcctgggctcggagaacgctcccaccgttcatctggatgccaaggaccagactctgcacgttctcaactcccatctgaccctgagcgaattgagcgaagagaacgaagaaaaattccgcaacgtgaccgactgcctgaaggaagaactggaacggcagaaggataaataaccttcccccatccaacatggacatgcgctccatggcctccctgtacggagacgcccgttccgcagcaatggaggaaggggaaggcgccgtcagggaatccgacttttccctccctgccgggcttccggacgagagaacgctccagcttctcctgctggaaggcgcatttggaacctcctttacggatgacctgggcagggaggtccgcattctggacttcggtgactggaacaaatccgccggaccggattttctaaacgccaggatccgcatcaacggcgttccgcaggcgggagacattgaactggaccccgctccggaagactgggaacgccacgggcacggctccaacccggcattcagcggcgtcatcctgcatctcgcctgcgcgcccagccgcagggaatggttcacccgcaacgccaggcacaagcgcatccccctggccgtcattcctcccgctgcgctggcgcgggcaaaaacggccccttccggcaatgccccggtgcgccactgccgccacgccgacctgttaacctccatgcctccggagcttctggaaaccctccttgagtcggcagcggcctaccggttccggaacaagcaccgccgccatgcggaacgcgccaaatacgcaggagaagagcaaaccctttttgaaagcctggcggaaacgctgggctaccatgccaacaaggacgccatgctgcacctggctttgcgcgcccccctgcgcgccatccgggaatgcccggaggccctcctcttcggcacggcgggattcctgctccccgtcctgccggattcctgcacggcggaagccgtggctcatcataaaaaactctggacccaatggtggcccctgcgggaacagtttgaactggcgccggagcgctccttcccctggacgttctccggcagcaggccggccaaccatccgcagaggcgcgcgggggcgctggccgtcatcgcagcggattttgccacgttcaagcgtctttgccattccggccctgcggaagaactggcggactatctttcctccctcaggcacccctactggagcacccatgtgacgctgccttccgcaccgtccccccgccccatggccctgatgggccgggacagaattctggactttaccgtcaaccaccttttcccggcgaaaggagacgaacatgcgtggctgcattacctctccctccgggccggacaggcgggaacaaaagtgctctccgtccaccaatccctgctgggcggcaggccggacgcgaaagcctttcttgcgaaggcgtggcaccaccaggccctgcttcaaattcacgaggacctgtgctccctccattcctgcaccgtctgctcgctgatcgggcgcatgggaaagaaatgagcgtcttgcgcctctttccataagcaggcacgccaatttctccggatattccccggaatgtctcccgccgtctttccgttaagagaaaaaatcctttctccgggcagtactcatttccgtgcctttccgctcttttttgaaccaaacgccggtttcttcccgcagtgaagccggaaaaataaaaaacttccagcccccataaagagggagctggaagccatggtcattttcctgccggagttgaaaccgggtacggaatcgcctccttttacctggcagcagcctgcggagcttccgcaccgggtttcagcggcagggttttcatgcgggtcatctttccgttgacgcgcacgggcagcaccttgggctggtcggaatacagcttcacgttgctcaccttgccgttcttccaggagaagtccaccgtgacgttgccgcgggcttttagtcccttcacggagccttcaggccacgcctccacaggggagggcatgatgtccaggccgccggcatgggattgcaccagcatttcacaaatgccgcccacaatcccgaagttgccgtccatctgcatgggcgggtgtgtggtcagcatgttcggcagggtgttggatttcagaagtccctgcaccatttcatgagccttgttcccgtcgcccaggcgggcccacagggcggtgcgccacggccacgtccaggaacggcggctgtctccggtcgtgccgcgccattccagggagaggcgggcggcttccgccagcttgggcgtcttgagcttgctgatctggttgccggggaaaacggcaaagaggtgggacgtgtggcggtggtccgtcttggggatgcggtcaatcatccattcctgaaggttcccttccttgcctatcttgttgccggccagcctcttcagcttgccttccaggctcttggcccaggaggcgtccttgcccaggatgcgggcggccttgatggtgttggtgaagagttccgcgatgagctgctggtcgtgcatcacgccgtcttcacgcgggccgtgctcgggagaccagccgttgggggccaccagggtgccggcctttacgtcagccaggtccttcttctcctcttcgttcggatccttgccgttcgtcttgaagccttcgcccctggcgcccagctccttcaaatggtcttcccagaaatggcagatttccttcatgaggggataggcctgcttttccagatatttcctgtccccggtgaacgcgtaatgttcccagacatgcagcgcataccacgccgcgccgggaatgttccactgccagccgttgccgccgaagatgttctgggaggtacgcaccgtccagccgcgcacgggcttgccgtccttggtattgaaacccttgttggcctgggagacgtcccggcagccgggcgccatcgcttccacgtaattgatcagcgcctcatggcattcggaaagattggcgggttccgcaccccagtacgccatctgcacgttgatgttgttatggtagtcacaggcccagggcggattgagataaacattccagagcccctggaggttggccggaagcgtgccgggccgggagctggacaggagcaggtaacggccatactggaacatggtttcttccagatcgggatcaaccggattcttcttataggcttccagccgctttggaataggcagtttggctacatccgcctccgtcttgccgaagttgacctttacccggtcaaacatggacttgtactgggcgatgtgcgcctgtttcagggcggcataatccgcagaggccgccttggccgcataacggtccagctttttggcgggggcctctcccttccagtccttcttatagtccatcaggtaatccgtctccatggcgatgacgaccatgcaggaatccgcgttcttcacggaaatcttatcgtccgcagtggaaagcgtaccgcctttgggacggatcaggacgcggccttcataattcatgccgtttttcagggttcccttccaggtgatgacggggcccttggcggaaatagccgattcaagctggctgttgatggaaaaatccgcgctgaactggccgggcttgctggccttgtactccagcaccagcacattggcgggcgtgctggcgaacgcttcgcggtcatacgtcacgccatccgccttgtaattcaccttgtggatgccgtcccgcaaatccagggcgcgcgtaaaatcctccacggaaacggaggctggctggtccccctttttaaagtctacgaacaaatcgccgaaaggcaggtagttgccgaactggttcgtcccggcattgagcccgtaaccatacccaccgccgggattggggccgccggaccacaggctgatttcattcagggcgaaccgctcgcggttgggcgcgctgaaaatcatggcccccacgcgtccgttgccgatgggatacccttccgcttcccaaacggcggaaggcttcttgtatttgccgaaattaccgtcggggttcttgtcctcctgcggataaacaactacggccggttcatcagaccagatcaggttggaggcggaaggcttgtccagggccccccaacccagagaaacggagctcaccgcaacggcagatagaaatagagattggagatgcatgctttaatgaggatgtcatatatttactgccgccgcaatctctatctttcagccttttcaacttaccctcacggcatgacgcacccctttccgccgttcttcctcctgacccggcgcctgttccgcaaatggtagcgcggacagtaaatttccttgtctttgaggggcgcacgcctaccgtaggcaagcatgtttaaacgacttctctccgcatttttttccttcgcccttctcgggacggcttccggaatatcttttgccggggtcaccgttccggacgttctgaaagaccggattgccctgaaaaaaacggcccagcagctcaacgtcgtttactttctgggcagtgacacggaacccgttccggattacgaacggcgcctcagcgaactgctgctttacctccagcagttttacggcagggaaatgcagcggcacggctacggcgcgcgctccttcggcctggacatcaaatcccccggccgcgtgaacatcattgaatacaaggccaagaacccggcggcgcactatccgtatgaaaacggcggcggctggaaggccgcgcaggagcttgaagaatttttcaaggccaatccggacaggaaaaaaagccagcacaccctggtcatcatgcctacctggaacgatgaaaagaacggccccgacaatcccggcggcgttcccttctacggcatgggccgcaattgctttgccctggattatccggcctttgacatcaagcacctgggccagaaaaccagggaagggcagctgctgaccaaatggtacggcggcctggcccacgagctgggccacggcctcaacctgccccataaccaccagaccgcctcggacggcaaaaagtacggcacggccctgatgggcgcgggaaactacacgttcggcaccagtcccaccttcctgacccccgccagctgcgccctgctggacgcctgtgaagtgttctccgtcactccggcacagaaattctatgaaggcaggccggaagtggaaatcaaggacacggccatttccttcaagggagaccagattctcatctccggaagctacaagagcccccagaccgtcaaggcgctgaacgtctacgtccaggacccgccctatgcggtcaaccaggactatgacgccgtttccttctcccagcgcctggggaaaaagagcggcaagttttccatgaagattgacaagaaggaactggacgggctgaccaacaacgaattccgcatttccctcatgttcatcctcgccaacgggctgcacatgcagaagcatttcacgttccactgggacgccctccaggattacagggacgaacccaaatcctgaaccggttcccctcccttggcggattgccgcggagacggcggcatccgcatcacgggaaagggcttattccttcaaactggtgcgccagccggaagcgtgctgataataataaaccgcctccttttccagctccttcatccgggcatccggcttcacaggctccccgtcacggaaaaactccgcgccgcgctgtggtttaagcaccaccatgtcccttcccttcaagtagccgatgtactggtaattgctcacgaaataccgggactggtaggagggtttcaaggcgtcctttccataaaacgccgcatcatacggccatttcagcaggccgagcagggtgggcagcacgtcaatctggctgacaggcgtctcaatccgttccggcttcagcagggccggagcgtagaaaatggagaaaatgcggtgcgtttccggattaagcgtctgtttcccggcgctgcccgcgccatggtccgccacaaacacgaacagcgtattctcaaaccacggtttgctcctggcctcctccacaaaggcccccacggcataatccgcgtacttgacggcgcccatgcgcccggtatgggaaggaatgtctatgcgcccttccggataggtataggggcggtggttggacgtggtgaacaccacctgtaaaaaaggagagccgcttttgaaggactcatccgcctcacgcacggcgcggcggaacaggtcttcatcacagacgccccagatggtggaatgggtcacctctgaatcatccatggaattgcggtccagaacctggaagccgttgttcccgaagaagtaattcatgttgtcaaaatacccgtagccgccgtagatccacttgaggtcataccccttgtccctgaatatggacccgatggtctgcaaatgctcattcccctcctggcggaggatggacatgccgggcagaggcggtatggacgtgctgaccgcctccagcccgcgcacggagcgggtgcccgtggcataggtattcgggaagaaaatgccctctttgcccagacggctcaggcacggcgtgacattcgcgccgtcctcccggcactcgtttaaaaactccgcccccatgctctccatgaccacaaccacgacgttgggccggatggcttccccggaggggcgcacccgcctcttcacgctgcctgatgcggcgtcaggcacggacgtgtcatccgccgtgaattcccgggccagaaacaccgccgcatccgcgtccggcagcgtcttgtaataatcgcggtagtccagttcattcttgagaaaggcgctgaacaggctgtaaaggccgtccttggccatttccgagttatagcggttgttcacggcatccgcatccttgatgtccaccagccaataccctcccgttatgcacgccagcaggaacagcaccacgcagccccgcttccaccccgcgggagcttccccatggcggggaaccagaaaacgcttcatcccccagacggccaggacggatacagccagaatggcgataagaatcgggatgatggggtaggattcataaatattcccgatcacctccttggtataaatcaggtaatccaccgcaatgaaattgaagctggcttcaaactcattccagaagaaggcttccgccacgtcctcaaacaggttggcgagcacaaacaggaaaaaccatgcgcaggtgatccaccggtccgcctttccccccgccctaccgcgcggcagaatccacaaataaacggcataagggatgagccagtagcacatggtgatggaaaactccgtcacgaaaatgtatgccgtcttcagaaggggaatgaccccgaaatccatgttgcggtattcaaaaaacaccgtaaacaggttttccaccgcctcaataccgaacgcgagcaggaggaacggccaaaacctcccccaataataacgaatcatcgtccccggaaatatgacagacggggcatgccgtcaatgctccatcacagcatcacgcaagtatggctgtcattccgcagagcggccgccgggcatccggactccctttacaccacatccagcgcggcgtcccagtccttccagacaggctccaggcccgcattccggatggcgccgaccacctgttccggagtgcgctggtcggaaatctcaaactgctccgttgccttgcagcgccctttccggtcctcgggaaggtccacctggtttccccgcaccgtcaaatgggcggtggccgttcccacccccgtgtagccccccggttccgtacgggcaatggcggacatgtgggtcatgcccagatgcatcagggcatccctcatcggcgcgggttcacgggtgctgacggacatgcctatcctggggaagcagatgcgcagggcggccataagctggacaaaatggcggtcgtccagcatcagttccggatcgggttcatactcgtaattcccggcgtagggacgcatgcgcgggaacgccacggaaagcgcggacttccagcaatgcttctgcaaatagtccagatgggcggcgagcgccatggcctcccgccgccagggggacaggccgaacagggcgcctatctgaatgcggcggaagccgccctggtaggcgcgttccgggcaatccagccgccagttgaaattcttcttcatgcccgccgtatgcagggtttcatacacctcccggttgtaggtctcctggtacacggccagttgttccgccccatggtggacgatttccgcatagcggtcgtccggaagcggtcctatttccagccccagcgaggggataaaggaatgcagcgcgtccaggcattcctgcatgtacccgtctgaaacgaacttgggatgctccccggccaccagcaggatgctgcgcaggcccagcccgtgcaggtagcgggcctcctgcaccacttcatccaccgtaagggtggtgcggatgatggggttgtcccgggaaaaaccgcagtacttgcaattattgatgcattcgttggacaggtaaatgggggcaaagagacggatggtccggccgaaatgcaggcgcgtcaggcggcggctctcctgcgccatcgcctccaggcgggcgtcgtccaccggttccagcaatgccatgaagcggcgcaccagggaagagggatggtccatcagaccgtttaattcttcagaaaaggacataggaagattaaataaaatttgagagagccggctgcccaaggccatttccacgcctgaaccggagaagcccaatttgcctcttccctcacaaaggattccatcttttaccgtgtcatttcccggagcggagcgctccatgaggaaagaagggcccctgcaaatcgtcgtgacagacggcctctcatggactaatctggccttatcctcccatgaccgccacgccgaacagccttttccgccattatctcgattccctgatccagcagggaacaacgcgcacgagcctgacggatgaagccagaaacgttctcaggacgtggtacgtgaccgccaaacagggaagccgccccgccgctgccgttcccgcagctccaccctctccccccgtttctcctgaaccgccgccccaggcggaacctgccccggcctccgtatcttccggggcaccggaaccgccggagctctttccggagagccgggaaccggcctccaccgtcgctctcccggaagggacgatggaagacaagctgcaatacctgcgggatctggcgcagaactggcagccggcgcgggagctcaattccctgcgggacaccatggtctttgccacgggcaatccccatacggagctcatgctcatcggggaagcgccgggctattatgaagaagtgcagcaggagccctttgtgggccgcgccggggaaaaactcaaccagatattgaaggccatgggactctcccgagacatggtctacatctccaacatcgtcaaattccgtcctgcgctgcctaaccagcggaccaacaaccgcgcccccacgccggaagaaattgaagcctgcctgcccatcatcatgaatgaaatccaggtcatccagccgaagatgatcgtagccctgggcgggacagccgccgtggggctgctggggatacagggttccgtcagctccatgcgcggcaggttccacgacctcaatggcattcccgtgcgcgttacctaccatcccagctacctgttgagatcagacagcccgcgggaaaaacgcaaggtctgggaagacatgctggccgtcatggaacgcctaggcatgcccatctcggaaaaacagcgcggctacttcctgcccagggaataaaaccgggaattcctgcatgccgcccttctcccgccacggtagctgaacggctgttttttcatggaaaacctgcggaacggtccgttcccttttcagcaatgcacgatccgctttttccttccgtgttccggcacttcccagaacaggcgtgccctgtcgcggctcactccctccatgttcaggtaccgcgcccgcagcagggaggaggagcggtgccccatctccatctgaagcaggggaaaatcccggaaccacttggcatgataggaagcataggtatgcctcagagcatccgcgctccattccccgaagcggtgatgcacgccccacccggcctttttccggagcagcctccagcgcaccggccagttgggagggcatagcaagccatcccgctcccctgccccgtattccgccagaagccgccggagcacggcatgaatggtgacgtgccgggctccccccgtcttactggctacggaccttacggaaatgacccgttcttccatatccacgtcattccagcggagacgcatcacttcccccggcctgatgccggcatacagcatgacccagaccgccggagcgcagtcacggaattcaggaatttccaccacatcccggaggctttttatttcttccgggaccagaacggcgatggtccgttcacggaacgcaggaggttccacccggacaatgggattttccccgcaccagccgcgccgcagggaaagggacagcacgccgctcatcactgcacggcccttgtaacgctgtctgcgggaggaaaacgcagtttccaaaaaacgcgcgcaatgctccggcgtcagtttccggaccggaaaatccttcaattccggacacctccgcatcaaggctccggtgaaatacctgatatcacgcagcgttgtgggacgaagcccgcgcttcgccctcagcgtctcctccacggcggcggaaaaggaaaccgtcttttcccctttcctcaattcctccgctcccaggaaaattgcctttctggcccggcgcatgctgcggcgccccccgcacaggctcagcaattccacggccagactggctgcatccagcatattcaaaccgcttcctttcaacaacatttccgccgccaaatatttattccggttttctccatgtttcgccattccgaacaccatgtttttgatattaatgcatgatacatcacaggattgttaatcctgtgcgtctgaatatattccgtccgttttcccgcctccggcgcatgaacggcgcgttgtgcggcggaagattgaatccacggcttatctaacaaatagatttttatttgtacataagaaattggccgttaaaagggattaatagatgaaaatattgtaatttttttcttgctaacaggattaacaatcctgtacatagaaattcagcagggaaaaggcacccatttccacttttccttaaattaatctgaatataacaaatcatgaatcttcgtttacccctcccgctgcgccgggctctgctggcagccatgtgcgtccttggaagccaggccttcgccgccgaatatacagcttccaccctggaagaattccaggccgcctggaaccagatggccaatggagacacgctgaacattaccggctccatcgattttgaaggaatagaattgagcgcattgcccgcagacgctgccatcgtcctcaaatcagacgggcatggaaaaatctccaacttcaactacaaggacatgtccgccgtggagatgcaggatctaaatgtggacggtgaaggaaccgtccgcgtgggcagcatgacggaaggaatgctcagcgggcggagcgacgccggaaacaccctttccatagaagacggctccaccctggacggcacatggcttgtcctggaaaacaacaagctggtggcgggagacggagccattctcaaccggaacgacgtcgtcaccagccacgccacctccatagaaaccagactggacccagaaacaggggcctttatctccacggtggtcactatcacaccgggagaaattgccatggagctgggaaaagacgtccaaatcaatgaaatggatttatccatgaatgacggagtccgcggccaaattgtctcccatggagatattgccctggctgattccaccctcgtctccacaggcgccgtcaacaccacgtccgtttacgaaaacgaagagtccggcactctgatcggccagtcggaatccgtgggcgcccgcggaggaattgacttcagcgcgggagccgtgacgatgacggataccgatctgagcaccgcaggcgatggagaccggttcacgggcggcgaaatactgctgggaaacaacagcatcctgaaagccacggaccgggcggaaattacgacgggagccctcgtcctttcccatggcattaccagaaaagatgaagacggggcctacctgccgggaaccagcacggaagaatccatggggctgtatggcgacatcgccatcggcagcggcagctccattgaaaattatgacatggacgcgaaaggctccatcttcatcggagaaggggcaaagctggcatccgtcacgctggatgccgtatccgtggaactgaattccttctccatggctgaaggggaagacggaacccgtaccgtccgcataaccaccgcagtaggagaccaggccaccgtttccatcggggccaattccacgctggacgacgtggatatctatgcggaaggcggagacatctacatcggcagcaatactgaaatcaccggggacaacgacctttccggcagccagatggccgatatctgggccggggatacggtgggagccattgacgacgaaggcgcctcctcccgcggaaccatctcctttgaaggaacgctcaagcagaacgcggacggcgactatgtgctggcctccggcgaatacacggaaggaacttatggcgggaacgtagtcattggcgacaacgctacgctgaccatgaccaccgtagccgcggaaaacaccatcatactaggggacaacgtgacctatcagggaacggaagaagcgtccgtctaccacatgagcgccttcagcgatgcggataacagcctcgtccacgccagcatcattgacacggatgaaaacggagacatcctcaacggaaccgttaccgttacggaacgtgaaaacaaaatcaccacgggccgcagcaacacgttcatgaacagcaaggccccgggcaggtccgccaccatggatatttccagagggggcgccctctacgcgcacggagacattctcattggagaaaacaaccgcttcatcggcaatacggccgccgggtccggcggagccgtcttcgcccagaacaacattgccgaggccatcacctatgaaaacggggaacgcacctccaaactgaccacggaagtgctggatatcacggtagggaacggttccgtcttctccggcaacacggccggggccaacggcggagccatcgcctccgagctgacgaccaatcttgcaatgcaggagggcgataatgtggacgacttatttgaaaatgaaggcgccaatatctggataggcaaaaatgtcaccttcacggacaacaccgccgccggactgggaggggccatccatctgatggaagaccgtcttcttctgattggctccggagccttctttgacggcaatatggccggggaagaagccaacgacatttttgccgaagacggctccgtcatcctggtggactccgccgcggacgatgtcaccatcatcaacagcgggatttccgacgcggactactactcccttgacgacggtccgtggacgcgcggttccgccacgctggtgcaaacgggcagcggcggcctgctctacggcggccgggacacggaagacaacggattcggaggaacattcatccaggattccggagccggttccctgatcgtgggccatctggctgaagtggatggcaccctggtcatggaaggcgcgcaactgggcgttgaaggcctgacggactatgaaatcaacggaggaggagttattctgacggaagattccaccctggccggcgacacgctggaactcaacggaaacgccgtgattgaaatgggcgagggctcttccctcctcctcaatggcatcacgttcaacggccattcctccatcaagctctggaatgccggtgaaacgggcaacggaagggacctcacccacaccgcagccggaacttcttccgtgggcaacatcaccatcaccggagccgatgtcagcgaactgcccctgttcaactccgcctttgtctccactaacgccgcacttcatgaagacggaaccatccggttgacgcagaacatgcacggagtagccgcccccatgcagggatattccggaaacgtctccggcgcggcagccggcatggaacaggcccggacgggagtccgggacggttcagccgcacacaggttctttgaaaccctcctgggaacctccagcgcggacgcggcggcagccatgattcaatccgtcagcggtgaaaccgtggtcaacgcggcgtgggcctccaatgacgccctcaagggctttgccgccctgggcaggacgcagggagccatttccgccgcacaggggctgaacgctccggcggcgaagccgatccagtccgcagacgcgaagggctcccccatcgccatggcgccggtggcctcaggccgcggctccgtatgggtgggcggactgggttcctggacgaaccagagcgcacggagcggcatcgacggctacaaatacgacgcaggcggctatgccgtgggcgcggactgcaagctctcctcctccgccctggctggggtagccatcggccagtcctacggaaccttccaggacaagggagggttgtccagctatgacgcggactccttcatggccatgctttacggccgctacacgcccgcaggggcttccaagctggccctggacggttatgccgccttcggcaccacgtcctttgacggaaaggcccgcatggcggacacctccgccagcgggaaatttgattccgactccttcggagccgccgtctatgccacttggacggaacagctccgcagcaaactggtcatcgcgccgtttgccgggctggaattcatgaccgggaagacggacagcttctccgaacacggagacctggcccggaccttcagcggagcacgcgcccagaactggacgctgcccgtaggcgtcactctctcccgcacctatgcggcaggcgccaaaaccacgctgacgcccagcgtgacggttgccgtggcgcaggacctcagccgcctcaaccccaagggaaccgtcagcagtgagctgggaacctggacggcgcgcggcgttaacgtaggccgcaccgccctgcgcgtcaacgcaggggtaagcgccgccttcggcagcagatggggagcccgcatcgggtactccctggaaagcagggccgggctgacggcccagggaatcaacggctccgtcagttactcattctaacgggcgttcctattccagtctccccggttccccacgggaccggggaggcaatcctcaacccttctcttcatgccttcttcaacaataatccgccccatcctgacgctgggctgtgcggtcctgctggcctcctgcggcggcagctccggcaaatcggactcctccggagtccagcccccgcaaacactggaaacaggctccgtcatcagcatgacggacggccatggagtctcctacaaaatcatctcccccactacgctggaaacggggaacggccgcttttccggaacgtactcctatgcgccgggtccggcttccgcccggttctccatgacgctgactgacggaggggaacatccctccaccatcaccagctccggagaaatgacctttacttccgcaacggagggctactactcggcaaccaaatatgaatccaccgttctctccccggaaggaatgggcggccccttcaaaatctccaaatagaaaaatttcccgggaaagtatgaattgttgattaggaaccgcttcctgttgagggaagcggttccgctttaaccggacagaccttttatggcggtcgcctccggcatgaatgtaccggcgtccgctcattcctgccgggcaggctaatccggccataccgcttgccagccgtctgtgaaccggaggcaggcataaaaaaaccgctttcccaccagggaaagcggctgccatttaaaagggagccattattccccgcgccggagaacggcgccattgctggcattcgtggcgaggtggcggtaacggctcagccaggaggaggaaaccttgttgtacgtgggctgccactccgcacggcggcgtgcaatctcatcctcgctcaaatgggcgttcagcgtacggtccggaatggaatactcaataatatccccgttccgcaacaggccgatcaggccgccttccgccgcttccggggaaatatggccgatgcaggctccgtgggtggctccggaaaaacggccgtccgtgataagcgccacttccgcgccaaggccctgccccatgatataggacgtgggggccagcatctcctgcatgccggggccgcccttgggtccctcattgcggatgacgaccacatcgccggacttcaccttcccggcaaggatgccttcgcaggcttcctcctgggactcgaaaatcacggcgggtccgcggaagctcatcatgtccggatgcacgccggccttcttcactacggcgccttcctgggccaggttgccgaacaggatcgccaggccgccgtcacgggaataagccttttccagcggatggattaccgtttcatccgtaatgccgcatccttcaaccgtttcacccagcgtctttccgctcacggtcatggaatccaggtggagagccccgggaatcctggcgatctcatgaatgatggcgctcacgccgccggcgcgcaggacatcctgcatgtggaagcgggaagagggggccaccttgcagatattcggggtgcgtttggaaatgtcattgatgcgctggaggtcatactccacgccggcttcccgggcgatagccagcgtatgaagcacggtattggagctgccgcccatcgccatatcgatcgcaaaggcattgtcgatggcgtcacggttcacgatgtcgcgcggcaggggaccgtccgccttcgccatctccacggcgcggcgcgcggtctgcttccagaactccttgcgttcctcggaagtagccagcagggaaccgttgccgggaagggccaggccgattacctcgctcaggcaattcatggaattggccgtaaacatgccggaacaggaaccggcgccggggcaggcgcggcattccagggaatggagttcctccgcattgattttgcctgccttgaagcgggcgacggcctcaaacacgctgttcaggtccagtacggtgccgtcctccgccatgccggcggccatcgggccgccgctgcagaaaatagtgggaatattgcagcgcagggcgcccatgatcatgccgggaacaatcttgtcgcaattcggaatgcagatcatggcgtcaaacgcgtgggcgctcagcatcgtctccacgctgtccgcgatcaactcacggctggccagggaaaacttcatgccgccgtggcccatggcaatgccgtcacaaacgccgggcaggttgaactccacgggagttcctccggccttgcgcacttcctccttgatgagggcggctaccttgttcaggtggacatggcccggaatcacctcattaaaggaattgcaaatggcaatgaagggacggcttaaatcctcatccgtcatccccgtggcacgcatcagactgcggtgcggcgcacgctcgaaccctgctttaactctatcgcttcgcataacaatacaactgttgcagtgcaagtgtatcacatgacgcagggaagagaagttgaatctaggccagtcttgcaaaacggaaacgcctccgttacagtctgtttgcataaggaaagactttagctgtccggaacacccttccggacggggaaatgtgaacgaatcgtcacatctaatatcgggacaccgccccttccttcatcgtaaaaaacagccatggcaaccattcttatcgctgaagacgatcacgccatctcagacctcgtggcctacaacctggaacgcgcaggccacacgcccctggcggcctatgacggcctgaccgcgctggaagtggcgcgcagggacaggccggaactgattctgctggaccagatgatgccgggcatggacggccacggcgtactgagagagctgcgccgggacagccgcacgcagaacattcccgtcatcttcctgaccgccaaggcccaggcggaagaccgcatccagggactggagctgggagcggacgactatgtgaccaagccattcagccccaaggaactcgtgctgcgcgtaggcagcgtgctgaaacggtgcgaacacacgccgggcagcgtcatcgcggaatacgggcccttcacgtttgacaaaaacgccctcaaattctacatcgacaaggaggaagtggacctgacggccacggaattcaagctcatgatctacatgattgaacgggaaggccagaccctgaaccgcaacgacctgctcagctgcgtgtggggatacagccaccaggcccagagccgcacgctggacacgcacatgaaacggctgcgccagaaactggcaccctatgcggactgcattgaaaccgtccgcagcatcggctaccgctttaccctgccggggcggcgtcccccggaggaagaggtctaacgctccggttccatgtcggccatcgactacatcctcatcatccttgttctggcctccctgtacctgaactggcacctggtccaggtatgtcggtccgccatgaaagcccggaaaaaggccttgcgggacgcccaacgcctgctgaaacgcggagaggaagcccaggaacaggccatcgtggacaaacggcgctttctggaagctctgggtgaggccttcctgctcatcggtcccgccgggcacatcgtgctggccaatacgctggccaaagagctctttcaggaagaaaggctggaaggacgcaaagtgggagccctggtgtgcaaccaggaactgctggggcatgttcaggaagcctttgacacggatggccccgtcaccaaggaatttacgctgagcgccgccaactcccccggcggagtgcaaaacggcatcacggcgtggcacttggacagcgccatcacggacaccccgatcaaggaaaaacgcatcctgctgcgcaacgtcacgcaaaactacctcaccaaccagatgcgccgggacttcgtggcgaacgcctcccacgagctgcgcaccccgctcaccatcatcgtgggatatctggaaaacctgatggaagacaatctgatggaggaaagccccggactggcgcgcaaattcatcggcgtcatgcaccagaacagccagcggctcatgaacatcattgaagacatgctcatgatctccaagctggaatcaggccacaaggccatcctgaaggaacaatggttccacctcacctcctgcgtagatgatgtcttctcccgcctggactccatccgggagaaaaaacaggccgccctgcacatggacattccgccggactgggaactctacggggatcccttctactggacgcaggttctgttcaacctggtggaaaacgccctcaagcaaaacacggaaccgggcctttccgtcactgtggccgcagccagaacaccggaagcctgcgtgatcaccgtcacggacacgggcgtaggcatccccgcggaaagccttcccttcctctttaaccgcttctaccgggtggaaacccaccactcctcggaaatcaagggaacgggcctgggcctttccatcgtgaaacgcgccgtggaggctcacgacggcgccatcaccgtctccagcaccccccaccgggaaaccgtcttcaccatcaccattcctctgaaacggttccgggaagaagcaaaggtataataaaagcacagtcaaaaatatttgacttcaaattcggaagacaagttaataattacaaaatctttgacccatttcctagtctaagagaaatagactatcgtttcccaatttctctatttaatgctcagcatgagcctccgcgtaacgttccagcgattttttatttcccagctgggcggccactttcagacctatttccgccatcttcttgcgtactgaagccttgtccgcctctttcagccatgcagtcaggcaagcatcagcccgcgcagacagctgtttgtctttccacaagtcaagcacctgaccataaaatccgagaaattggagggccgttttttcatggctcaataacggaggaagcgccttttccaatacggcgcaggtctgcaccctcaccttccggtccaccttattctgctggtaaaactttaaccagtttttgaaaaagattctcttggttttcaccccataaggcaactttccagccatatccggaatatctttccgggctaaagcgcagaaattgcgcatatacgcgtctacagaatcccatgattcattttgcgccagcaatcttggataaacggcatagccattcgcctttttccaatcaagccccagttcattcttcatgaaatactcccacagagtgggatttccgggaaaagcctccttgaattgttccagcaaagccaatttatctttctccgccaggcggacattccttctcatcaaggcctgccatgcgggataattggaggcattccgtcttaatgcctctttcagcagtgcttccgccttctgtggatcggcagccagcagggataaataataacagagattggatgcagcggcatccttccccttccaaaaacgggggagctctgtaatcgtggaaacggaacctttccacggtcctccggacccgccttccgaccatatccagccataaatgttatttcctatcttccattctccgtctgcccccttccacacaaaggcgcaatgccctggctggccgatcgtgtaggaaggaatccccttcgtcttcacaaacccggccgcccctttggaaacggcgccgcacacacccccatactccacgtaaatttgcaaagaaataggtttatgatcgtagaacgctccaccggcatgcacgctgattccctgcttattcttcatccggtaggggatcagaccgcaacaggcataccctgcgttccccgccttgatcttctttttgccagccaggtaatcctgtgcccaggcaagctcctcaatactttccctgccccggaaaagaatgccgaattcccacggttccagcgtaatgaactgcggaaacagttttttctccgcaaaagactttttgtaaaaatcataccgggcttcgcatgcctccggctcccgggacgtagaaaccaacgccgcacccaatgccatgttgagaccaactccggaaagctctttcccttccttcacccagatattccgcaatacagccagcgtattctttcccgaggccttggcaaacgccagtttttcaaacacctccgggtgattcagcaaccattgcacaaattccttgtccttcaattcatgaaggatgtaagtcctttccttccccaccaacgcaaaaaaatgggccatgtagcaagcctgcgccacctcccggtccttcaacagagattccacggaaaacgttttttccgcctccaatttcttttgaacatattgccggcacagcccggcaatattccgcacatcccctccttccacctgccatgccaggcgctgatgggacaaatctccagcaacaaccgctggcaagaagaacaaatagaggaataagagtttaaacataaataggctaaataagaaaactatctatgaggatattttttaccaattattttctgcgcttgggaaaacccttgtacaagtaggaagcttgaggaactcgtccaattgttctatccaataaatcaggaatttcatcatcaccatatcccgccaatttaagatatcttttcacctgtacagctttagtcggataaaattggactaacattcctacaaaatcctcttccatattattgatgattgaattcaattttctttgtctcccaattctaacattcatgtaattacaatattttgtaaatctatctctatcctgcctaagatccatgttatataaatataaaaatctattatatttatatgtataaagaaaaagaggattcaattcttgtcgaaattgattcaatatcatggatgaatataacagaaacaattctctcatcacaagtgcctcgtcatgaagttttgttccgttagattttctaatttctttcggaaaaaatgataaaatcattttttccttcacttcataatcaagatcagaattttcgcatagccattctccgttaccttctacagtgtcatcaataaagggaactgcggcaaccaaataaaaaagccacatccctttttgcaaatcattttttatatcaggcagtattttattagcttgttcataaaatttaaaaatatccccctgcagggctgatttttcagcgtttgatagtaggagatataatttttcattagtttcatgaaggagaggtttttttaaagaactatcaaatattttggcctcgcttacagtcgaaaaaactaaaataaaacatgataatatatatattactttcataacagattgtttgactaactgaattattatacttacagatcaatcatctctcgttcctgtatctatatgaatggcgtcccctcctgtacttctttcaacagaacatccaaatttacaaattttaactttgaaatttttcaacccatctatacgattcccatcataactttcatcaaatgtttgaatatacactacatcaccgattaaacaacaatctttcccattgacaacagtgtaaaacccgcaacgccaaaaataaaataatggcaatggaagattttggaataataatattgaattttcccgatgttccttcggtggatatactccaattaaatcactcatatgtccattatactcatcaattcgttgtggatttggattaggcatatgaggagccaatccgtcagtaagatcctcaggtttatccaatgatctttctataaagtttatatttgaaaagctcaccgtccgcggctgaaagactaaagctaaatgagtggaagccccaacttcattcactttcccatcacggggaccatcaggactccgttcagaaagatttatcccttctattttgtttggtaccagaacattaaatttttttggcttgggcttatcgtccaaattagttttaacttccacacttacctctcctttgataacaggatcctttttagccgttaaaacagctttaaatttatccttttcattaattgttagtattgcccatttttcactttgttcggaaagtttccattctatctcatccttattaacaagagaaagtaattttccctccaactctaaatccgcttcttctccaattccaatatcttctcgtttttgatcttcctctctatccagatcaaagatcatacattcagcagaatacttgcgtgtcttcgaactgatatataaatccctcccttcgtcctctaaatctccatcttctgcaaaccctaaagaaaatgctccaattgccatgaagaaaaaatttccccacatgaataactgtcctgaccgtttcatagaagtataggttgtaatacgtatacaaaaaaatcagaattcaggcaaaaagtcaatgattttagaataaaattgagacaatattggattcgccaggaatatggggacgagaaaaaggagattaccttaggctgaagaatatgatgcccacattaagcaatccgcaaaaccccatctcaatccgcttgattacgatattgataagctcaattctaaataaattgacagcatgacagagagcgtttggcagttcattgaatctctcctatatttctccaacaaagcattacaatttcttttcctaaaatgatttgctacgtttaaactcctaaattagactagataactctattttcatttgtttaaagaaaaagaaaagatttgttctttactgaactctattactttctttagatgtttgcgtttatgttaggagttgctcaaagtgaactagactttctccgaatttcccatgctcagttccacatctaatctttcacttcggaacgatataatctgacagcaatcgtgcgaaggggaatggagtgcgggggatgagcggaaaaccttcttttacggattgggagggagacgacaccagcatcgcttcatcatcttgacctgtccttttattcccttatgcagagcaccatcaacccgcatcacaaaacaatggaataaagacacatgctgtctttttctcttcactaaagatattgtttttgtgttggaaagtttccttttagccaacgctgattccattgaaaagaaaaacggcgtccttccgctggacggaggacgccgggattttccggaaatcggatagactgccagtttgagcagcgaagcgcacaaaccttaggacttgtaacgcaaacgcttcttgtgacggttctgacgcatgcgcttgctgcgcttatgcttgttgatttttgctttacggcgttttttgagcgatcccatgattgtggttcgtttgttgttttactgtggtgagaaaaaagttaatagaccagcttgttgagcgggtattcaatgatgccttccgcgccgagggccttgagctgcggaatgatatcccggacgacggattcgtcaatgaccgtttccacggccagccagccttcttccgccaggtgggagatggtggggcggcgcagggacggcagggcttccacgagaccattgagggaagcggcggggaggttcattttcagacccactttccggcgggcttccagagcgcccctgagcatcatgaccaagctttccagcttctgctttttccattcgtcctgcatcgtttcccggttcgcgatgaactggggataggaggtcatcaaggtgtccacgatgcggagcttgttggccttgatggagctgcccgtttccgtgatgtccacaatggcgtccaccagctccggcactttcacttccgtagcgccccaggagaattccacatgggccttgatgcccttttcctgaagccagcgttccgtgatgcccacgccttccgtggcgatgcgcttgccctgcaggtcttccgcgcaggtgataggggagttttccggaaccaccagcacccagcgggtgggcttggaggtggccttggagtattgaaggtccgtcagcacttccacgtccgcgcggttttcataaatccagtcgcgtccggtgatgccgcagtcgatgaaaccgtcattgacgtaacggccgatttcctgggcgcggatcaggaagagttccagatcgtcgtcgtcacaggtcgggcggtacccgcggctggacacgtatacattgtagccggccttgcggaacaattccacggtggagtcctgcaaactgcctttgggaagtgctattttgagtttcttcgacatgatgggacgggaatgaaaacccacgcgggcctcattgtcaagtttagaaccgaatccggcccattttaccgggccatgagccgttcaatgtcatcaggcagcagcggcacgtcccccaacaggtcaatgttttccttttccccgatcaggatgtcgttttccaggcggatgccgatgccttcctccgctatgtagatgcccggctcaatggtgaagaccatgcccggcagcacgacggggttggtttcccccacgtcgtgcacgtccagccccaggaagtgggagcagccgtgcatgtagtatttccgcacgatgggaggatcggacggtttttccgccacctgcgcgggcgtgacaagccccagcttgacgagttctccggcagcgaagacgcgcaccaggcgctcatattccgatttcaagatgccgggcctcaggacgcttttggcataggtcatcatgttcagcacgctttcatacacggcgcgctggcgtggggtgaattttccgttcacgggaacggtgcgggtcatgtcggagttgtagtttccgtattccgtgcctatgtccatgagtaccaggccgccgtcttcgcacctcttgtcgttctggatgtagtgcagcacgcaggtgtcctttccggaggcaatgataggaaggaaggagaatttgcgcggcccccggctgatgaattcgttagccagaaagccctcgatctgccattcccccacccccggcctgatgaaccggagcagcgcccggaagccttcattggtaatgtcacaagccttcctgagcgccttgatttcctccggctttttgatctggcgcatctccgccatgatttcataaacgtttttcagaaccgcatccgggaatttttccttcagttccttggtcatgcgggcattgcgcgtttccaccgggcaggtgcagcgcggatgctggttggcttccacaaagaccatggtggcggccggaaccagggtatccagcagcgtatcatattcattggtccaacgcacgtcccggatgccgctcaattccctcgcctgatcctgcgtgagacgggctccttcccagatggcgatctgttcattcgtttcacgcaacagcaggatttcatcccagccgtcctcccggatggtcatgatgaggacggtttcctcctggtcaatcccggtgaggtaaaaaaggttggcattctggtgcagggcgaaggtgccgtccgcattcgtggggaacacgtcgttggcatgcaggatcagcatactgccggcgggcaggcgggaagccagttccgcacgattgccggcaaaaaaggaggaaggtagcggctcgtatctcataccgacagcatgctccgcttttccagcttgtcaatcatgcatccggacacgaaacggccttcctgcggttcatattaagttcttgcggcccggcattcttttgttcattctgggctttatgcttttccgtgctgttttttccgccgcagctattcttttcacgggcgtttcctgctcctccggtccttaccggcccgtttccccgctcattactcatgctgcggagctgaaggaggcgcgcggcaacctcggcggcgtctggtgccatccctccgccgggcaattcctctggaaacagcaaaggcggcagtacgtttacattactcccgtggaaatcagctccatccggcagcagttcccggaggcttccccctacctggcgcgcgaattccgggattccctgcaaaaggaggttcgcctcttgattgaccgcaataatgagaagcccggcaatcatgtccgctgggtgctgagcgaccgcccgcgcacgcccggcgtgaaggtttccctggcgatcgtccaattaaagcccacggacgttgggggaaaagtcgtggccctgggcgtgggaatcgtctcgccgattccgggcgtttccttcattatcaatcatttcgcctctggagcggtagggattgaaggcaacatcgtttccctggacaacgggacgatcttgaaggaattttacgggcgcaacagggatcccatcaatattttttcctgcaacagttttgaggagttcgcctgcgacaagtacaacctggaccgttttgcccggcagattgcggaaattctggaggaggacccttcccattcctgatttccccccggcggggaaaactcttgatgacaatcgggtcatgactcgaacaccggacatgcgggcgccgtcttatcctgcatgtacggtgctatttcacggctcctgctggcgctgggaacgggattggttttttcctgttccagttcccagcacatgcccgtttcccccttgattacccatcctcttcatgcggattccaaacagagctgcttccagggcgtctggtacaaccccacagagcaggccatctggaattccccgcgcctgaaggtgtatgtggcccccatcaatattgattatatcaaggccagattcccgaaggaggccccggccctggcggaacagttcaggacggagcttcagaaagatatccgcagggtgctggagaataaatccaaacagaccggaggaaggatcaagtggcagctggttgaccgccccgcaccgggcggcgtgactctttacatcgccatggtcaagctgaagcctacggacgtaggcggcaatatcatgtccgacctggtttccctggcgtccccccttccgggcacttccctgatcctcggcaatttcatgagcggggacgtaggcattgaagggcgcctgtcagacatgcgcacgggcaccagcatcatggagttcaaggcctacaatacggaccccatcacgctgttttccgtgaaggagttcgagcgcttcgcctttgaccagcagaatttgcagcttttcgccagcggaatttccgccattttcaagggcggaccttccagttatattcccaagacgggggaagttgacctggacccgttttaagcggcttttccggctgattcctccttgttctttttttcaggatcatagaaggtgcattcctgcaccgtctgcctggttttaaaggcatagacgaagaaggcgacgcccaccagcacgaggaagacggagaggaactgcccgcgggtcaatcccatggagaagggggagtccggttcccggtattcctcgcaaacgattctcccgacagcatagagaatggcaaagatgccgcagaacacgccattccaggcacgcgggaatttcacccggatgaaccacagaacggcaaagagaagcactccttccgcaaatgcttcatacaactgggaaggatagcgcgcatggtcctgcatcatctgccccacgatttccttgatggcgggcgtatccctcacccggtcggtcacccaggcggcagtcatgcggtccggcacggttattccggagagggaaagcttgtccagcaatccgggcgtttcatagatgcgggaggccacgcggacgaacaagtccgggtcctgggacagttccgccggaaagatcattccctgggcggatccgggcgatacaatgcgcccgtacagttccccattgatgaagttggccatgcgcccgaagaagagccctacgggggccacaatggccagcccgtccagcagggccacccacttgacgcggtgcttccacgcgtagtagaacgtgtacagccccacgccgatcattcctccgtggctggccatgcccccttcccatacccgcagggccatgagcgggtccgccaggaactgggaccagccgtggttgggtatctggtaaaagagcacgtatcccagccgtccgccgatcaggacgccgaagatcgccacataggtgacaaagtccgccagcctgtcctgcggaatgggatacagcttccggcgggacagccaggagagcagaaagtatccgccgatgaaacccatcaggtaggccacgccataccagcgcagggcaatggagtccgtcacctgccagatgacggggtccaggtcgtgtacgtaagcggtcaaattcatgggcgttcctttcagggcagataatgggtaagggcttccacggcttcacggtccagggcgcgcaccagcgccaccgtcagttccaccgccgcgcggtagtcccgcaggtccagcacgccgttatgggcatgaatgtaccgggtgggtattcccagcacgatcgtgggaactcccctgccggagagatgaagggccgccgcatccgttccaccggaacggcgcaccgtcagctggaaggggatgcctgcatccgccgccgttttctcggccagggcggccagacggggattggtgatggccgtagggtcaaacaacctgatctgcacgccgccgcccagggcaccctgggaatccgccacggtaaaaccgggggtatcgtccgcgggggggccttccagcacgatcacgcaatccgggcgcatggcgactccggccgtcttcgcgccacgcgtccccacttcctcctgcaccgtggcggcggcaatcagtgtattggggtgtccttcccggcacaatgtcttgaaggcctctatcatcacggaaaggccggcacggttgtcaaaggccttgcccatgacccggaacggattttccagaggcgagaatgccgcgtccggcaccacgggatcacccagatgaatgccgaattcatttttcacctgttccgcgctttcagcgcccacgtccacaaacagggcttccatgctcatgacgctgttgcgctggccttccggcagaaaatggggaggcttggaaccgatcaccccctgaacgctgcggcctgaacgcgttttcaccagaacacgctggctcaacagggtatgcggccaccagccgcctatccccaccagttgaagaaagccgtttgccgtgatgttctgtaccaggaacccgatttcatccatgtgggcggccagcatcacgcgggggcctgaatcgccattggtgcagaacaggcttcccgaaccgtcggaggaaaattccccgcatccttcaagttcctgcgccacaaggttccgtacttcatcctcatgccctgaaataccgtgggcttctgaaaactttttcagcagatccgaatcaatcgccatgggccgagcatgtgaaaacaccccttccaggtcaagcccgcagccatgccgcatgattttttcttgaccgcacggggggaacctccggattgagcctcatcctgcgcaacacccgttacatggaaagaaacaagagatttttgctagccacagttcggtttttggtgtaactaatcagggaatcgaattgtgctatgaaatccatccttaacactatcacggccatgctggctgcggtgcttttcattcctgcggcatcggcgcaaaccaccagcaatcccagaatgcaggtgaaggtcacgttggaaaagctgtccctgtacatgcgccagtcccccaatgtcatgacccaggacgacccccggccgctcccgaagccgaagagatgggcggattttgaaatgcccttcaaggtggaagccgctcccgtgcccaagtccggctacattgattccctgacgttcaaattctatattgccgtagtcaacccggaccgtgcccgccagtacctgaaactgtacaaggaagtaaaatacgtcaatgttccggtaggggaagccacgtatgcctccgtctatctctccccttcttccgtcaagcgcatcaccggttcggaaggcggcaggggcaagtgggtgaagtaccagggcgtggtggtggaatacaatggcaaaatcgtcgccacttattcctccgaacgcggcaagatggaaaaatggtggaccatccagtcccccagcatcgtggaaacctcctattatcccctcctgaacaaggatgaaacgcccttctccgtgtactggtatgaccgttatccggaaatcatgaggcccaacagccagcaggcggctcccagcccggccccgttcggcacgcccacggaagctccggctgcggacggcgaataaagccccatcaacatttttctcatctcattttttatttaacagaaatcacccatggctaattcacgacaaatcgtcgcattaaacgtaggttcccagagagtttcaatgggcgtcttttccaagacctccaaagacgcccttatcctggaccgctatgctacgcgcctcgtagtgctggacccgtcggcggaaggcttgcgcctgacgaaaataggggaggcaatcgccgacctcgtccaggaactcaatgtcaaaggcagcgttgccaactattccgtttccgggcaatccgttttcatccgcttcgtcaagcttccggccctggacgataccgatgtggaacagctcatccgctttgaagcccagcagcacgtccccttcccgctggatgaagtggtgtgggactaccacctcctccccgccaagggcctggaacgggaagccgtccttgtagccatcaaggcggaagatctggattcccttaatgacgaaatcgtctcccacaacctttccaccggcaaggtggactgcgcgctgacctccctgtacaacgcgtatgtggacagctacccggatgaaaaagagccggtgatgctcatcgacatcggcgccaagtccacggacctgatttacagcgaacagggccgcttcttcacccgcagcatttccgcgggcggcatcttcgtcacttccgccatcgcccgggaattcaacgttcccttcatggaggcggaacgcctgaagaccaccagcggcctcgtttccatgagcaacggacagacggaggggctggatcccgccacggccaacctggctaccgtcatccgcacggccatgaccaggctggcttccgaaatccagcgcaccaccaaccattaccgcgcccagatgaacggaagcgctcccgtgaaggcctacctgtgcggcggcggcgcgtccctgccctacaccaaggaattcctggaagacaagctgggcattccgatttccttcttcaaccccatgcacaacgtgggcgtgggttccggcgtggacgtgaacaccatctcccgtgaagcctttatcctgggcggcctgatcggcaccgccgtcaacgccatcggcagggcttccctcaacattgacctggaacccacggcaattgccaaaaagcgcgccaaccagaagaagatgcccgccatcatcgccggagccgccatcgccgttctcggcgccgcagcctatgccgtcaccggatatatgggcgtgcagaaggcggaggaaaccctcgccggcgtgcaccccaccgtcacctccatcaagtcggagcaatccgccctgcgccagaaggaacaggagctgaaaaaactggacgccaccctggcctcctaccaacagctcacactacagcgctacggatatgcggacatcatcaagcacctgctggaacagtcggaacacaaggattatccctactggttcacggacttcgaaccgctggcccacttcaatccggaggataccacccagatcacaggctactccgttatcaaggattccttcacgtcggataaaaacacgtccctggtggacgacatcaggatggaatcctccgcgaacacctccagtgaagatgaaccgtccgtttacagcgttaacgccgtgcgcctgaccgggtttgtccggcgcagtctgggcggccagagaatcatccaggaccttcaggcaaaaatagacgggaacaaggaatccctgttcaccttcaagcccggagacgtaaagctggaagcccgccagatcatggagctgggagccaaggacgccaaggtagacgcagcggcaggggcctttgtccccttcaagctggtgcttccgttaaaaactcccattcccgtgaactttaacaaataagattacccaacccgaacaagacatattttatgagcaattggattacagacaacaagcccgccgccatggtggcgggcgtggggcttctcttattcctggggttatccgtaactgggtacatcgtcaattccaaacgcagcgagctggacaagaaaatcagcgtcgcctccaaggagatcaaatccgccaacgccgctgaaatcacgccgagccgcgcatccaatgaggagctggaaaaggaactgaaccgctatgctaaggcggtcaccagcctggaaacggcatacaagcccttccttgcttcctccgcgctggttcccaccacgcccacggcattccagaatgaactgaaaacgttcagggacgccctgatcgcctcctgcaagaaaaagaacatcctgatcacggacacttcctcctggcttggcttccaggtttacagcacccaggctccgtccgtgcaggcggcctccacgctgggctttgaattgaaagccgtcaacagcctcgtcaacaagctgacggactgcggactgtccaaattcatcaaggtgtaccgtccccagctccccattgaaaatccggcgaacaatccggaagaggacgctgacgagcccaaccaggcaccctggactcccatgcccctggaaatcgccttccagggcaaccgggaaagcgtgctgaaagccatgaacgctattacggactcccaggattacctgttcacggttaattccatccggatccgcaacgagcgtatgatgcctccccccatcgccaatccggcagcggccaaacctgccgccgcccagcccgctgcgggagcggcatccctgacgccggctgatgaagcggctgcgcccgcagcaccggccatccagcaactcatcaaaccttacatgggcaaggagcaaatctttgtccaggtctccctcaacctggtccacttcaaccagcccaaggcacaggaaccgtctgaagattaattacggcaaccaaccgcagcaaatactttcaacatgtctgaaaaacaaaactacgacaaaatcctgctggcctccggcatcgtcctgggcctgggggtagccgtctatggtacggtgacccttctgggactgaatgacaagtacaagttcaccacgcaggtttcggaaaaggcgattgaacctcctcccggcatcaagaaagccgcggaagtcaatcaggagctttccgcctcccatgagctcaagcccattgcgcaggaaacgcagcagtacgtgggcttcgtagctcccaatctctggatcaaggaagggggaatggaaccctttgacattatttcaggacctcccatccacggcaacatcccgaacaaatggttcctggacaacggtctggaaaatgagttcgtttactcggacgtcctcacccgggaccctgacaacgacggattcaccgtacaggaggaatatgaggctaaaacgcatcccaatgatccgaacagccacccacccctcgtcaacaagctctttgtggacgaaatcaagcagttcggcttttacctggccttcacgcagtcggacggcaatgacttcaccttcaagggcatgaaccgcgccaggcaggagctttggagaaacattgtccagcccaacggcaagttcggcacccgcaagaacacgaaagacgaacccaggttcgagcttgtcagcgtcgccagcaaggaattcaagaaccccagcctggacatggtggaaacggacgaggaagccgtcgtcaaggatttaaagccgaccaaaaacggccaaacctacaccatcaggcgcggcacaaaatacgtcattccaatcattgataagaaagtaaaccttactatcgccgccggccccgaacgagataccagctttgaagtggaggaaggcgccgacttccagatcccgggagacaccaaacagacctatacgctgaaaaccgttgataatgctacgcagaccgtaaccattgccaacaaaaccactggagaacaaacaacactgagcaagaaaaaatagacccggatttaaacttttctgaaaaaaaagcttcacaaatccgaaaaacatgtaaaaagaagaacctaactatggaccacgcaccactttatcaaccgaagcgttccctgatcgcgctgatggccattgctgcctcctgcccgtttgcgcaggctggtgatggcggcgccgtcggaacctccagtgccttgggatcgtcctacgccggaccgggcagttactaccagtccgatgcagcgcgcatagccatggcccgccgcgaagcgcagacccaggaagccatgcagctccttgcagaaggccgcaacctgtaccgcgaaggcaagtacaaggaagccctggacaaatacaatgccgcttacaacatgctgccctccgcgccgatcaacgaccagcgcaaggaagccatcgccaaccacattggcgacgccagcatcgccgttgctcaggaatacatcaaagtgggccgctatgacgaagccgacaagcttctccaggacgccatcaagctcaatccccggagcgccaagcttgccaagcagacgctcgaatacatgaaggacccgattcgcacgaatccggcgcttacacccgaacacgtcaagaacgtggaaaaggtgaacaccctccttcacatggcctatggttactatgacctcggcgactacgacaaagccatcgccgaattcaacaaggttctttccattgacccgtacaacgtggcagcccgccgcggacaggaaacggtcaaccgccgcagaatggcctattatgcggccgcctacgacgagacccgcagcaccatgcttgcggaagtagacaaaatgtgggaacgccccattccgatggaagtcccgacgggagccgacggagcggacaacgccccgatcacggatgtcaacggcgccacggccaacctgatgaagctcaagagcatcatcatcccctccgtctcctttgaagacaccaccgtggaagacgccatcgactacctgcgcaagaagtccatcgaactggaccgtacggtaggcccgaacggcgaacgcggcatcaactttgttatcaacgactcccagcccgcagccgttactccgacagctcccgcagctgacgacggcggcttcggcgaggaatcaacggacgtcacggaagtcgctccggttgccgctccgcaggaaagcatccgcacccgcaagatcggccagctcaagctgaccaacgttcccatgctggaagtgctccgcttcatctgcagcaacgccggcctgcgccagaaggtggaagactatgccgtcaccatccttcctgccggcggcaatgacgtggatctctaccagcgcaccttctccgtgcctccgggcttccagtccgctctccgcaccaccgtcggcgacggcggcggcgacgtcagcgaagaccccttcggcggcggcggtgaaagctcctccggcctcaagcccatgccctccatccgcagcctgctgcaaaagagcggcatcagcttcccggaaggcgccacggcattccttgtcaacggcaactcctccctggtcgtccgcaatacctccggcaacctggacctgatcgaacagctcattgaaaacacccgcggcgaatcccagcaggtgcgcatcatgaccaagttcgtggaagtgacccaggaaaacacggaagaactcggctttgactggatcgttacgccgttctccgtcagcaacgaccgcagcaccttcctgggcggcggcacgaactacggcaccggcctcgttcctgatgacttcacccagtcccctggcggcgtaagcggctggcccgtgaacaacaacagcaccaatacggacggcaacggcctgatcaacggcctcgccaccggcggcaaccgcacgggcgactacgccattgccaagaactccgtggacaacctgctgaacagcaccagccgcactgaagccaccaagaagaatccggctcccggcatcatgtccctgacgggcatctatgacgaaggcgccttccagatgctgatgcgcggcctgtcccagaagaagggttccgacgttctcaccgctcccagcgtgaccgccaagtccggtgaaaccgccaagattgaaatcatccgcgaattctggtaccccaccgaatacgaacccccggaacttcccaacaacgtgagcagctggggcggcggcaactacaataaccggaacaacgttctggatgaccttgtaggcaccgaaaaccaggcccaggtcaccagcttccccgtcactcccgccactcccggcgtgtttgaaatgaagcccgtcggcgtgaccctggaagttgtgcccaccattggtgacaacaagtacatcattgacctcaacttcaagcccagcatcgtggaatttgaaggcttcgtgaactacggcagcccgatccagtccaccggcgttggttccaacggcaagccgatgtccctgactctgacggaaaaccgcattgagcagcccatcttctccaagcgttccgttgaaacgtccctgttcatctacgacggccacaccgtggcaatcggtggtttgatcacggaaaacgtgcagacggtggaagacaaggtgccgatcttcggtgacctgcctctcatcggacgcttcttccgcagcaactccgacaaccacatcaagaagaatctgatgatcttcgtgacgggacagatcattgacgccacgggccagcccgtacgcggcaacgcccttcccaccgcggccgctccggaaagcgcactgcctgcttccgaaggcctgctgcctcccatgtaggcggcgtgcataacgtccatattggagcgggtgaaagggtgaacctttcacccgctctttatgtcccatacatacccggtttttcccttccctcatgaagacgctgatcgtgaccggcggaatcgccaccggaaagtccaccgccatccgcctgctgatggaggagggggggccgcgcctgcgcctttttgactgtgatgcggaggcaggcaggctgctggacggcggcaggctcagggagaggctctcccgcgccttcggacccgccagcgtggatgaagacggccgcgcggacaggaacttcctgcgggagcttgtcttccggaatccggaaagccgcaggacgctggaaggaatcattcaccccctgctgcaccaagaatgtcttgcgcaaatgcgggcggcgcgtcagaatgcggcggtagccgggtttgtcattgacgtgcccctgttttttgaaacatcggcgcgctaccaccaggatgccgtgtgcgtggtggccgtttcccgggaaacgcagaagacccgcctggctctcaggaacggattccgtgaggacatgattgaagccattctggcggcccagcgtcctatcatggaaaaagtggccgcggccgatttcgtcctctggaacgaaggaccgccggacctgctccgccagcaaatccaaagactctaccaacatttttttcatgactgaagaactcgacaacaagcccctcccctccggagaggatccgcaggcggctccccccaagccccttcccgcaccggaagggatttctgaggaacatccggctgccgctccggaggaaaacgcaggggatacggcctgcgctccggcagtcccggcccgggcggaggaagccgccgctcccgttccggaacagattgacatcaatgaactgcgggaacgccccctgaacgatcttcaggagatggcggaaagcctccctatccggaacgcggcctccctcaccaagtcccaactgatttttgagctgggaaagcagcttctggcaaagggccatgaagtagtcgtctccggagtcatggaacaggccaaggacaattacgccatgctgagggatccggtcaaaagcttccgcacctctccggatgatatttacctgggcggcaacctcatcaagcccctgcacctccgcgtaggccagcagatcaaggtcaggctgcgcaagctgcgtccccatgacaagtacctttccgcctcttccgtcatcagcgtggaaggcatccccgcagaagagtaccgggcgcgcagtgactttgaacgcctcacccccctcttcccgaaggaacgcctccttctggaaaacaaggaggtcaattccgccgccatgcgcgtgctggacctcatgacccccttcggcaaaggccagcgcggcctgatcgtggcgcccccgcgcggcggcaaaaccgttcttctgaaaacaatcgcccgttccatcagggccaattatccggaagtggaattgatcgtgctgctgctggacgaacgcccggaggaagtaacggattttgaagaaaccgtggatgctccggtgtacgcctccacctttgacgagccttcccgccgccacgcccaggtttccgacctggtcattgagagagccaagcggctggtggaaatgggcaaggacgtcgtcatcctgctggactcccttacccggctggcccgcggctacaacgccaaccagacgggaggacgcatcatgtccggcggcctgggttccaatgcgctggaaaaaccgcgcaagttcttttccgccgcgcgcaacgtggaggaaggcggcagcctgaccatcatcgccacgtgcctggtggatacggagtccagaatggatgaagtgatttttgaagaattcaagggaacgggcaatttggaaatccggctggaccgggagctttccgaacggcgcatttatccggccatctccctttcccagagcggcacccgcaatgacgacaggctgtacaacgaacaggagttcgtcaagatcatgcagcttcgccgccagctcgccatgaagccgggctgggaaggcctccaggccctcctgcaaaatatctccaagacacagaacaatgcggaactcctgctgacagggttgcgttaaggttcacctccctttttccgtctttaccgcctccgttccctcaccgggacggaggttttttatggagatgttccccgtcatttccgggttccgcggcaatatcatggacatcatggacatcatggacatcatggacatcatggacatcatggacatcatggacatcatggacatcatggacatcatggacatcatggacatcatggatagcatggatagcatgtttgccgggagccgctccgcccggaacaagggggtggagtgaacggattctcctccgtcacgcgtccagttttacccggaaaatacgcatggagttgcccaccgcaagcaggcagacgcctacatccgccatgacggcggcccacataccggccagccccagaatacccagcaccatcaccagcagtttgacgcccaggatgagaacaatgttctgcacgataatgcgctccgtcgcccgtgacagaaccatcccctgcggaacggcaacgggatctcctttcatcaccaccacgtccgcagcctggagagccgtatcagaccctacgccgcccatggctatgccaatgtccgcggcagccagggaaggagcgtcattcatgccgtcccccacaaaggcgagcaggccttcttccggcttcagccgtcgcacgtgctccagcttgccggccggcatcagcccgctgaacacctcgtccagccccagcttgcgccccacctccgcaccggcggaggaggaatcccccgtcagcatcaccaggttggaaacgcccagcgccctcaattcccgcaccgcctgttccgcccccggcttgatccggtcagacaggcgcaagcgccccagcggaacgccgtccagagccacgtaaatggttacgccgcgatcctcttcctcccctgcctctacccccgcctcctgaagaaaagcctttttccccaccagcacggccttcccttccacacgggcggaaacgccgccccccgttacttccaccagctccgccacacggtccgggaacaggctgccttcatacgcctttacgatggaacgccccagcgggtgggaggcggagctttccgcgtgcgccgcccagtacagcagttcctccggcgttactccgtcacgtggaagcacttcatccacggaaaagacgccctccgtcaaggttccggtcttgtcaaacaccaccgtcttcactttccgcagggcatccaggtagttgctccctttcagcagaattccctgcctcgccgcccgccctatcccggcaaagaagcccagcgggatggacagcaccagcgcacaggggcaggagatcaccagcagcaccagcgcgcggaacaggccgtccgtccagcttccgcccgtgacgaagggataaagcaggaacaccagaacggcaatggagatcaccagaggcgtataaatgcgtgaaaacgtggacagccttccttccaggggggatttatggccggaagcggcttccaccagttcctggaccctcgccagggcggaatgccgccagtcccggtccgtgcgcacctccagcacgccctgtccgttgatgtacccggccagcacggtgcttccggccccggcctccaccggaagggattcaccggtcatggcggaggtatccaggacggaattcccttccgtcaccgtgccgtccagcgggacacgctctccggggcgcacttcaatcacggaaccgggccggacctccgcgggaggaacgtcacggacagtgccgccctccctcacatggacggattcaggcctcaggttcatcagttcgctcacggaccggcgggaactgcccaccgcgcgctcctggagatattctcccacgcggtagaaaagcatcaccccgacggcttcggaataatcccccaggaacatcgctcccagggaggcaatgctcatcaggaaattttcatccatggcacgcccgtgcctcaaccccaaaaaagccgccttcaatacatcccagcctatcagcaggtaggccgccgcatatgcagccatgccgctccaggaatcgcttcccatcaccagggcggcgacaaacagggcgatgcccagcacggcgggcacgggcctgatggcgtctccagagccgcagcagcttcctgaacagcaccctccggcgcagcaggaagctccttgtgaaaaatgttcgtgggaatgttccatactcatgacctgttccgcttgtacgcctgcgtctacgctatggcaagccctatgttagttcaatctaacaaagagcttttgctacttcttctttcttaaaacgttccagaactccctgccccaggaattcgtccatcgccatggcgccggcgcccagcagccccgcttccgcgccaaatctggcgggcaggatttttagctcctccatgtgcatggggaacaattgctccctgaggttcttcagcaggggcttcatgagcaggtctccggccttggctaaccccccgccaatgatgaaggcgtccggcaccagcgtgtacatcaggttcatgatgagacaggccagcatttccgccgtgtcctcccatagctgaagggcgatgggacagcccgcgcgggcggcttcgtccaggtccctgggcgtgcattcgttcacggttttgacgattcccgccccggcataccgtttgaccgcctccgccgccagttcgttgttgccgatatattcttcaatggctccccggttgccgaacgggccgggcttgccctggtaatggatgctcgtctggcccagctccccggtggaaagccgtttcccccggaggatgcggtcattcaccacaatgccgccgccaatgcccgtccccatggtcaggcacaccaggctggacatgccgcgcccggcgcccagcttccattccgcatacgccatgcagttggcgtcattgtccagcacgacggggaggcccagcgcctgctccatcagctccttcaccggaacttcatggtcccatacccggacattggtaagctggtaaagagtccccctgtagtaatcgcaccatcccggcatccccatgcccatcacgcaggcggacgggaattgcccgcgcaggttcagggccgccgcaatcatggcctcaataatcgcctggggactttcaaacatggcggtggggatgcggtccgccgtcgccagaatacggtcccccgccgtcacgcccattttgatgctcgtaccgccgaagtccacggccaatgcgcagggttctgaaaagctcatggttcatacttatgccacgcaccccctggaatcaacgcaaaaacgcattcacacccatccctttccgcggcatgccgaacttcttgtataaaatacaataaatatcctccagaaagggcttgccagggatgcgccgtccagtccatgataggcgccgtgatgatggaaatgcccggttcggacgaatggttcatgcgccaagccatgaaagaatccagaaaagccctggtgaagggggaggtgcccatcggggccatcgtggtgaaagacggccgcgtgatcggccgtggctggaaccaggtggaggccctcaaggacgccacggcccatgcggagatgatcgccctgacggcagcccaggaggcgctgggcgactggcggctggaaggctgcaccttatacgtcaccaaggaaccgtgccccatgtgcgcgggggccatcgtccactgccgcccggacagggtggtcttcggctgtccggacgccaggaccggagccgcgggaggctggatcaacctgctggattccaaccctcccctcaaccacaagtgcgaggtgcgtcccggcgttctgggggacgaatgcctgcaccacctccaggaatttttccgtgcggcgcggctggcggccaaagaacggaagaagctggctgcggactcccccgcaattccggatgaaaacggggaagacggccccgaataaagcactttgcatttgccaaagcagcggactcacggcaagctagcggggctatggaacaccggaacgacaacgagactgcggaagggacggaacgcaagccgtcctggatcaaggtgcgcctgcccaacggccgggaattctgggacgtcaagcagcttgtggaaggcaagcacctgttcaccgtctgtgaagaagcccactgccccaaccgctacgaatgctggaaccagggcacggccactttcatgatcgccggggagcggtgcacgcgcgcctgcgcctattgcgccgtaaaaaccgccaagccctttccgctggacccggaggagccgcagcacgtggcggacgccgtcgtgcacatgaagctgcgccacgccgtcattaccatggtcacccgggacgaccttccggacggagccgccgcccacttcgcccaagtaatccgggccgtcagaaaagccagtccctccaccatcattgaggtgctggcctcggacctgaatgagaagccctcctccatccggacgctgatggcggcacgtccccacatcttcggccacaatctggaaacggtggaacgcctgacgcccatcgtgcgcttccgcgcccagtaccagcgctccctgcgcgtcctccggatggcgctggactgcgtggacggcaaggtttccaccaaaagcggcatcatgctgggcctgggagagacggaagacgagcttttccggtccatggacgacctgctggaacacggcgtcacggtgctgacgctggggcagtacctgcgcccctcccgcaaccacctgccggtggtcaaatacatccatccggacgacttcgtccgttatgaggaggtcgcgcgagccaagggcttcaggcacgtggcgtccgggccgctggtccgcagctcctaccatgccgccaatttcaccccggaagcggacgtgctggaggccattaacgaagatttgagaaaggccggcgaactttagaataaatcttgatatattaacccttcccttttaccatacaggcaattccacgtcattgagaatctcatgagcaaaacacgttccttcatcacggccggggccattctgggtggcacggtcatcgtgacggcggcagtcgcgcccctgttcctgccgaaccagaatatcaagcccctgacatccgcccaggcggcggaaatcaccgcacataccatgaactccaagtgtgcggactgccataagcccggcacccacatttccgaattggtgaacaccctttccggcggcctgctggcgcgccacatccgggacggacagcgcagctacaacatggatgaaccgcccactgccgtgaccctttccaaactggaacacgtgctccagatcaattccatgccacccacctcctacaccatggtgcactggggcagcacgctcacccttccggaaaaagcagccatgctccagtgggtcaaggatgaacgcctgaaaatcttcggcgacatggtgggcaaggagtacgccatcaccgccatctcccccattccagacgcccttcccacggatccggccaaggtggccctaggctataagctgttccatgacgtgcgcctctccacggacaataccgtttcctgcgcttcctgccactccctggagaaggccggcacggacaacctggccacctccaccggagtccgcggccagaagggaggcatcaacgcccccaccgtcttcaacgccgccttccacaccaagcagttctgggacggacgcgccgccagcctccaggaacaggcgggcggacctcccctgaacccggtggaaatgggttacgaacatccggacgactggaaccagatcgccgccaagctgaaccaggacaccgcgtttgccgcggaattcaggaaggtttatccccagggcttcaacggagaaaccatcacaaacgccatcgcggaatatgaaaagaccctcatcacgccgaacagcccgttcgaccgttatttgaagggtgatgaaaacgccatcagcgagaatgccaagaagggctacaggctcttcctcaagctcggttgccagacctgccacaccggccccgccatgggcggccagtcctttgaatacgccgacctcaagggagacttctttgccggacgcgccaagaccaatgacgacaacggcctgatgaacttttccaagaaggaatcagacaggcacaggttccgcgttcccaccctccgcaacgtggagcttacttggccgtacatgcatgacgcctccgcccagacgctggaggaagccatcaccaagatgtaccactaccagctcggctacgacaaattggacaagaaggaggtgagcctgctggtggccttcctgaaaaccctgaccggggaatacaacggcaagcccgtccagggcgaagtctgccccgcctcctgagccagaggaaagcattttttccagccgcgccatgaaccttcatggcgcggcttttttgtattcccccttccggcttattgccggaaaacccccgtttccggcttttcctccgcgtcatacttagattaaactaatgggtaaatgattcatgatgaataatttttatccaaattgaaaacacaggcgcataatatcattgacttactagtttgatgaaactaactttctcccggatttgattcatacacacaccatgccactctccatgctcaacatcggcgatattcgccaggttaacaaaattcatggcagggatgaaacccggcgttttctggaaagcctgggcttcgttgccggcagcacggtttccatcgtttctgaaaacggcggaaacttcatcgtcaatgtcaaggggtcccggatagctctcagcaaggctcttgcctgcaagatattcgtggcctgaaccttctcatccaacaatcagccatcattctatgaccaaacaccgtacattaagagacgccctgatcggggaaaccgtgaccgtcgggaaactggcgggggaaggcccggtcagaaggcgcatcatggacatgggagtcaccaagggaacgcagattttcatccgcaaagtcgcccccctgggagatcccattgaagtcactgtccgcggctacgaactctccatccgcaaatcggaagccgagaacatccatatccattgattccgcccttattaccgcacgtttcctgacctgacagcaagacggcgcacccatacatcaagacaaggaaacatccatgagcaacattaccatcgccctggcgggcaatcccaactgcggaaaaaccactctcttcaacgccctgacaggctccagccagtacgtcgggaactggcccggcgttactgtggaaaaaaaggaaggccgcctgaaaggccacaagaacatcatcattgaagaccttccgggcatttattccctttccccctacaccctggaggaagtcgtcagccggaattacctggtcacggaccatccctccctcatcctgaacctggttgacggcagcaacctggaacgcaatctttacctcaccacccagctttgcgagctgggcgttcccgtcatcatcgccctgaacatgatggacattgtccggaagcgcggcgaccgcattgacacggaaaagctttcccgggatctcggctgccgggtgctggaaatcagcgccctgaaagggaccggaatccgtgaactggtggacgccgtcgtaaaaacggccacctcggaggatgcccgggccccgcgcgccgtgcacttcccggaccgtctggaaaaagccatcggggaaataggtgaaataatcaccggcaaatgcctggaccagcagaaaaaatggtttgccgtcaaggtttttgaaagggaccagaaagtcgcggaccagctcgcgctcacccctgaggagcagtcccgcatcaacgggatcattgaagccatggaacaggagatggatgacgacagcgaatccatcatcaccaacgagcgctacaattccatttcacgcattaccgcggattccgtcgtcaaggccggtatcggcagcctgacgggaagcgacaggatcgaccgcatcatcaccaaccgctggctgggcctccccatctttgccgtcgtcatgtgggcggtgtattacatttccatccagacggtgggcgcatggggaacggactgggccaatgacaccttcttcggggaatgggttccggaatgggtgggcggcctgctggaaagcgccaactgcgccccgtggctggaaagcctgattcaggacggcgtgattgccggcgtgggggccgtcctgggcttcctgccgcagatggcggtgctgttcctgtgcctgggtattctggaagattgcggctacatggcccgcgtggccttcatcatggaccgcattttccgcaaattcggcctttccgggaagtccttcatccccatgctcgtttccatgggctgcggcgttccgggcatcatggccacccgcactattgagaatgaaaaggacaggcgcatgaccatcatgaccaccacgttcattccatgcggagctaaaacgcccatcatcgccctgattgcaggcgccttcttcccggaaaattcctgggtggccccgggagcctacttcatcggggtgggcgccatcatcctttccggcctcattctgaaaaagaccgccatgttctccggggatcccacccccttcgtcatggaacttcccatttaccacgttcccgcctggaagaacgtcatcatccacgcgtgggaacgctgcaaggccttcgtgcaaaaagccgggacggttatcttcgtgtccagcgccctgatctggttcctttccagctacaactggaaggttgattccgtggagcagaatgacagcatgctggcctccatcggcaacgtggccgcacccgtcttccagccgctgggctggggcgaatggaaacctaccatggccaccatcaccggactgattgccaaggaaaacgtggtcggcaccttcggcgttctgtatgcggacggcagttccggggaagaggcggaggaagaacccgccgaaacgcaggaaatgtcccccgccggccaggagctccaggcatccctggagggcgcctctgaagaagctgccgccgaggaagccgccgctgaagaggaggaagatgaagacgctgaaatcagggaaaccggggaccgcctggtccaggcgggagccttcacgttcctgagcgccttctccttcatgattttcaaccttctctgcgccccctgctttgccgccatgggagccatcagaagggaaatgaacagcgccaaatggactttcttcgccatcggctacatgtgcgccctggcgtactgcctggccttcctgatttaccagatgggagcatggctttatgcggaagcttccttcggcatcgggcaggggctcgccgtattgctcctgctgggcctcatttacctggtggtgaagaaaccctccgcaccctccaaataaccctcatacccactcctaaccccctcaccaacatgggaacatatatcattgccaccctccttttcctggccctggcctacgcgctgtataaaacgttcagcaagcgcggcaagtgctgcggcaactgtgacgggtgcggcaacggcggcgatagctgctgcggcagcggcggcggttgctgcggaggccaccatcacgacgacgagcaagaaaaacaggactgagcccagtctcagccctttctttcagaacctgcagaccgcccgcggtttgcaggttctttccttctgcgcatgccgcatgcgctccctccttaaccgatccagccgtgctggtacgccgccatggccgcaatcaccagcgcgataaacaggaagatgaaccacatcacattgtggcggtggcggtactccacggccatcaggggctcccattccttttccacaaaggagaagtcgtcaccgctggcaaaacggtcgtacagcgtttccagctcctgccccgtcaccccttccggagcggcgaataccggcgggcagcatgagcccgtcttgaacacgatttcacagtggtagatgccgtccgcttccttgtaggactggaggcacgcgccgtcgcgggcgcataccacatggccagtcgttccctcctgcaagcggcgcagagcagtatcacggtcggtcacttcatcatttgaaatttcccattgaaccttactcattctgtcagtttaagacagttcccatccaagtcaacatggttttaaatgtttcctgacgccggaaatgtcatcaattgtcataaatccggcagcgtgcaaggcgctgatcttaacgttcttcttcgtgtttaattcacctaacttgttgttagtcaaaccaaagaactttcaacagatgggaagaagtgctaatctaaccatcagcggctacaaccagccgcacaacataagatgatgaacaagtacacatgtatcatgataggagccgcctgcctgctggcagcctcctgtcaggcggatacggcccgcagggaaccggtgcggaatacggcgccggcctcctccgtacaggcctcttccgcagcgccccagtccggacaacggaatgacggggttcaggaacacaggcgtttcaagcgcctctcgcttcctttgagataaagaataagcaacgccgcaccccctacctgatcgagaatgcgacgttgccgtcaggtcatgcagaccccttcaatgtccttgcacgcaggattccgctctctgcatgcagacggacaaggaagacttgattattattgcgcttccacagattcgggacatttcccgcctagaacgtgacgacgcattgtacggagaagatattggcggagttgacgtcatcccgcccggaaggattcttcacatactggtaggaaggctggatgaggcagtacggcgtaatggagaagctgtacgtgcattccagaatcatttcccggtcatgcccgggccgcgtttccgccagcgtgtcggcatccggcttgctcacggagaagcctacgccgaagaagttgccgtccgcttctttcaagccggtcatgacttccagaggtttcttgaaaatgaccccggcggacgcctgggcttccgctccgcagatgttgcctgattcggcgctgctccagccggcgcgggcgaacagggcgaacgggctgctgcccaggtcctgttccaggttgaacgccacgcctccatggttcttgccgtccgcatggaacatgaacggctgcaggcggtacgtgcccgtgccgatgccgaaggccttttcatgcgtccagccgatttcaccgagcaggttgaaggattttccggtcgtgtggtggaacgggttgcggcggggttcattgtccatcatgttgccgcccacctggatgaaccagttttcattgaactggtactgccccacgaacccgaagttggagtcccccagcggaagcacctggttgttgacgaagggagcgccgccgaactgtccgaaggtggtgttggcatacgtattggcgtcaaaatagttcgtctggttgatcatgccgcccatgatgacgagctggccgtccatgaatccctgggaaaggaggagttccggcaggtagaagtagccgtcttcaaaaacgtcgcagttggcggggccgctcgcgccccaggagtcgtccagcgtggtgcggtgcgtatgcttgttcagggccacggagccggaaagctcgctcttgatccaggtgccctggttgcggctggatttgaacagctgcagcccggcctgggcgtggaatttgtaccagctctggctggaaccggcagtctcttcgttcgcggccgcatggtggcccttggtatagaggaacgcctgctccaccaggaactggaagccggctttctcgtaagcgcctttatgcagatccgtcagggccctggtcagaagatcgttcggaatgggcgtgctttcatcgccgtattcgtccccgaacaggtcgatgtcgtccagaatggaacctttgccttcagcctcttccgcagccggagcggcggcggtagtggctacggatgccgtaccggccatgcagaagccggagcaggccagcagggcgggtatcatgtagcgtttcttcatagtaatgctgtatcttgagtcttcctcgtcaatcgcggatgttcagccttccatggcggaggagcattcctgctcccggcctgcggcggactgcgcatccacggctttgccgcatgcgcccatacagaactcacagtccccgcagagcaggcggtatctgggacgccggacgagaagcccggccagtttccggtaccggcaaatccggcggaagaaacggtgaagtcctgtatgggtcaagttcatgcaacgcggcaaagttagatagaactaactattgagtcaacactttttctcccttagcccttttccaatttggaactccttccatgaagcacgtttcatacctcttttatgatcaatgtattgaaaaatctttaaaataattttacgtaccgtaaaaaaattagttgaaactaattcaacttgacctgaaacctgcggaacgttacaaaaaagcaggcctattggagatcatccaacccttccgggaaagaaacggctgcatgccgccaaggccggctgaacccaacaaaaaacattaccatgagttacatcaacaacaagggcctctggggcttcgtcggcggagtcatcgccgccgccatcggcacgaaagtggttaaaagccccgctaccaggaaattggccgtccaggggctttccaaagccatgctcatccagcagaaggccatggagcaactggccaatatccgtgaagaagcgcaggacttgtgccacgaggccgccgctgaaaaccgcaagccggaacagtaacaatctcattgttcatcatcatactggggcagcccgtttccttctccgccggcggaacgggcagcctccaacgggggaaacgcacggagaagggcgtttccccctttttcatttttccaaaccgatgcactatcaggttatccaccatacgcccggcaggctccgggtgcgctgcggccgcggcatgttcaaccatgaccaggcctgcggcattgaatgcaggctcctgaagctgaaaggggtcagctccgtcaaggccactccctgcaacgggggggtgttcatcctgtacgaaggggcgaatccccagaccattttccgcgcgctggacaggctcaggccggaaacgctccgcagccatgaaccggaagaacgagcggaagccaggaaactgggccaatccttttcccttaagatagccgggaaagtttcttccttcctgctctgcaaattattcctgccgccccctctcagaatggccaaggctttctggaactacggctcctatttccggcgcggaatggcaggcctgggcagcggcaggctcaatgtggcggttctggacgccgtatccatcggggtctccatcggcaccagggcctacggaacggccaattccatcatgttccttctttccatttcagacctgctggaaaattacacgcggaagaagacccgggcggcgcttgcggccagcctgagcatcaacgtggaccaggtctggagggtggaaaaggacggcatgcgccaggttcccatggaacaaatccggcccggggacaagatccgagtggacgccggcaacgtcatccccgtggacggcgccgtcctgtccggggaggcggaagtgaaccaggccgccatgacgggagaatcggaagcggcagccaagcaggaaggctccgtcgtcttcgccgggaccacgctggaaacaggctccctcgtcatccgggtggacgccatgggcgaccagtcccgcatcaacaacatcatcgccctgattgaccattcggaggaattgaaggcccgcatccagagccgggcggaaaaactcgcggattccatcgttccactcaccctgctcacggcgggggtgctgttcctgttcacccggaacatctccaaggcgctctccgtgctgatggtggattattcctgcgccatcaagctcgccacacccatttccgtcatctccgccatgaaggaagcttccgcgcgcaagatcatgatcaagggcggaaaattcatggagctgttcgccagggcggacaccatcgtctttgacaagacgggcacgctgacctccgcctgcccccaggtgacgcagattgtccccctgagcgactgcagccgggaatacatcctgaaaacggccgcctgcctggaagagcacttccctcacagcgtggcgcgggccgtcgtgcgcaaggcgctggaggaaggcctgcaccatgaggaagagcacgcggaggtggaatacatcgtggcccacggcatctcctcccgcctgcatgggaagaaggtcctcgtgggcagctaccacttcctttttgaagatgaaggcatcctcctcacggaagaacagcggcagaccatccgcagccacgccaggggcaaatccaacatcttcctggccataggccgcagggcgatcggcatgatcggcgtcagcgatcctcccaggccggaagccagggaaacgatcgcccggctgaagcggcagggcatttcctccatcatcatgctcaccggagacagcgagtccgccgcccgcgccatcagccgccagctgggcatcacggaataccgctcccaggttctgccggaggacaaggcgcgcttcatccagcagttgaagcagtccggaagaacggtgtgcatggtgggtgacggcatcaacgattcccccgccctttcctgcgcggacgtctccgtctccatgaaggattcttccgacatcgcccgtgaagtggcggacatttccctgctgtccagctccctgagtgaactggcggttttaagggaactgagctgcgccgtccttgaaaaaatagagcgcaactaccgcttcatcgtcgggttcaacacctccctgattctgctgggcatgttcgggctgattaccccggccctttccgcgttcctccacaatgcctccacggtgtacgtcagcgcgcgcagcacgcgccgctgcctgcccccggtcggcactccgcagtaaaaggaaagggatggttcatgtggaaatgaaccatccctttgaaaaacgtgctgagccttcctattctccgctcttccggcaatgctccgtcaggagctggaaccgtgaaatttcctccagcgtcatgatgtgttcaatgccgcaggccacttcgtccgcgcgcttctcctccatcttcagcaccgtgatcaggaattctttcaccatggtgtggcaggaaataacccggtccgcgtaataacggccctcccgggtcagcacaatgggggaatactgcgtatattcaaccaggccgcgttccttcaactgcttcatggccagggagacggaaggctttttcacgttcagcgcctccgcgatctctcctacggcggcgcaccctttttccagctcgatgttgcggacggcctcaatgtaatcctccaggctgttgctcagctccagggagggaaagtttttgcgtatcatgactgatgcttattaggtttaactaacaaaaacaataacccaagctccggccaagtcaacctcttcttgaaaaatattagatgagacaaacttttttcttgcaagacaagttagattgcactaactttcattcatggtcagcccaaacccggaaagaaacaacggaagaaaatgctccggcggcgttcccgccagaacggagtccttcttctccaggttctttcccgcctcgcgcccctgctgctgccggggctgcgccctgaaatgctccgggaaaaattgtccctccggcaacaagggaaaacaggcgcggccaaactccttggggaacgcgtccacaaactgtatggactagtcatccggtgctctaacacattatcgcctaaacacgggcgcgttccccttcccttttttccttcctctgcgggccgcggtcagcggagaaccaccgccggaccgtcatacccttcaggcgtatagctgcggatggagacgcccccctccgccgtcacgtccgccgcccagcactcggcatggtggaagcaggcgcccagattgacgtacagccgccctccccttttcccggtcaccgcacggcggtgcagatggccgaagatgacgacttccgcttccgggaaaaagcgttccgtgaatttccgcatgcgccgcatcatcgtcagccatgccagaagaatctgcgcgggccgctccggcggccaggcggaatgcgccagaaaacgcaccagcttgttccggcacgccccggaacgcgtgtaaatggggggaaccagcacgctcatggcgcgcgccagttccagccgccgccgcaaatccgtatccgcctccgggaacgcggcaatcagctcacgggaggcctgcttgtttttcaaatattcccatccccacggggccacctccttgaacagggcatgaccgtgcagggcgcagacgcgtcccccctgcaatttcagcagtccggccttctcatccgggtcatggttgccagccagcagcacgggctgcactccggcatcccggcacatttgcaggaaacgggcgcgtttttccagcccttccgcctggcaggggctttcacgggtttcactgaggtccccgcacaccaccagatgagtgcacccctccagcaggaaagccagctcctccggctcccgggccagcgccttggcatggccgaagtggacgtctgaaatgaaccgggcacgttctcccggagcaaggtcaagttcctgaatcataagggcggagggaggaggaaaacaaccatggaatcaggagcgcagccgctgccgcaccatctcatacaggcacacgcccgtagctacggacacgttcaggcacggaacgctccccttcatgggaatcctgatcaggaagtcgcaattctcttccgtcagccgcctcatgccttccccttccgcgcccatcaccagcgcggccggccccgtgaaatccgtttcatacaggtcgcggtcccccttgtccgaggtgccgaatatccagatgccgcggccctggagctgcttcatggtgcgcgccaggttggtcacctggatgaaaggcaccttttccgccgcccccacggagacgcgcagcacggtctccgtaatgcccacggacttgtcacgcggagcgattacggcatccacgcccgcgccgtccgccgtccgcagaatggctcccaggttgtgggggtcctgcacgcagtccagaatcagcagcagggggttgggggacttgtccagaatcccgtccagcacatcctctcccagcgccttcacggcaattttggccggagcgctgcgcacatgcttgttccggcgcgcctcctgttcgttcccttggggtctcatgcccatgaattagcgtgtttcacgcttcttttccagacaaatatgccccgccgccccatcattgggcgtgacttgagggtctccgttatgctacagttccgtaccattcaagatgaagacgagcgactttttagtcattggggcaggtgttgccggattgagtttcgccttgagagcggcggaacacggcaaggttgccgtcattacaaaaggcaaatttctggattgcagttccgccaaggcgcagggcggcatagccgccgtttgggaccgcaacgactcctttgaagaccacattgcggacacgctggacgccggcgcgggcctctgcaacgaacaggccgtacgcaccattgtggaggaaggccccggcgccatccgggaactgctggaatggggcgtcaattttgaccccggcaaccagggggaggattacgaactggcccgggagggaggccataccaagcggcgcatcctccacgccaaggacgccaccggcctggaaatcacctccaagctgctggaggcggccaagctccaccccaacatccaactgctggaagaccacttcgccatcgacctgattacgacgaccaaactaggtctggtcacggaagaccgcgtgcttggggcctacgtgctggaccgcgcctccggggaagtggaaattttccggtcagaccgcgtgctgctcgccaccggcggctgcggacgcgtgtacctgtacaccaccaacaatgattccgccacgggggacggcgtagccatggcctggcgcgcgggagccaccatcgccaacatgggattcgtgcagttccaccccacctgcttcttcaacacccgcgcggaaggagcggaagcgcgctccttcctcatctccgaggccgtgcggggcgaaggcggcgtactgatcggagcggacgggaaggaattcatgcacaagtacgatccccgcaaatccctggccccgcgcgacattaccgcccgcgccgtggactcggaaatgaagaggacgggcagcatgtgcgtctatctggatatctcccataagccggagggcttcgtccaggagcgcttccccctgatttacgagacctgcagccgctacggcatcaaccccgccagggagcccattccggtcgttcccgcagcgcacttccagtgcggcggcgtcctgacggacgtcaacggccagaccagcctggatggcctttacgccgccggggaaaccgggtgcacgggcctccacggcgccaaccgcctggcctccaactccctgctggaatgcgtggtggtcgccaagcgcgcgctggactccatgctctccctccagccgctgagaaaggatgcccccacttcttacgacatccccgcgtggcaccacggggataccgccctgccggacgaactttccgtcatctatcacaattgggatgaaatccgccgcctgatgtgggattatgtctccatcgtgcggaccaacaaaaggctggaccgcgcggccacgcgcctccggatgcttcaccgggaggtgaaggacttctactgggggtaccgcatcacgccggacatcctggaactgcgcaacctggtggcggtggcctccctgatcgtggactgcgccatgcggcgcaatgaaagccgcgggctccacttcaacacggattatcccggcaagctggatcaccgcttcgtcactcaactgcaccgatggtaaaacactggcaacgtcaacaggcattccggaagggttccgctgggaactccttcctttccgcatgcctgcttgcgttgctggccctggctccggcaggggccgccagggcggacatccagacgggccggagcgcaacccgcgccctggcggacagctccggacggcccaaaggccccgtcatcatcacccccacgcagcgggacccgctgcccagggtcatcgtcaaatcgcccgccgcggccgcgggcggcaaacgcccggcaccccagccccgcatccttcccaggacggccagacagagccccggcacctatccctggcggctcaatatcaccgccacggtcttctgggtgggggaggattccacggagcgcaacccggtagccaaccacaagagctcgtgggactccgcctggcgggaaaacttcggcggtttcgacaatccggaccccgtgtgccgcaccgtggacttccgcccgaaaacgttcgtcccccggcaaaatcctttttacgtggcgctgccctacaatgacgtttgcaagggagagcacaagacggaggcgtcacgcgtcatcccgtggttccgccgggaatacacggggaaagggcaatccgtctgcaaaggcaggtgggtgcagatcgtctacaacaagcgctcctgctttgcccagtgggaggactgcggccccttcaccacggaagactggccctatgtcttcggcgacaagccccccgtcaacacccagaacaagggagcgggcatcgacatctcccccgccgtgcgcgactacctgggcatcaccggcggaacggccgtcgtccactggcgctttgtggaattctaccgcatcccccgcggcccctggtccaaatggggggataacaaccccttcgtcaattccgaagtaggccccgggagaaaagccctccagtcccgggaagaccgcctgcgccagcagcaggaagccatccagagggagctgttgaaggatccccagaagctcaggagggaactccagggatagtccgttccgccgcggccatgcaacgtccacgcattctacatattttcagccgctacggcgacgtggggggggaggaagtctgcttccgcgccatcacggaagagctgcgtgccgtggcggacgtcaccccctttgtctattccaccgcggagctgttccagagcccccacggcgcgctgacgaaaatgcgctacatgctccgcaacagggacgtggaggaaaagctgcgcgaatgcctgcgcagagaccgctatgacgcgtggatcatccacaacacgttcccggccatgtccccctgcgtctacgggctggccctggagcaatccgttcccgtcatccactacctgcacaactaccgcgccggatgcctcaacggggtattctaccgggacggcttcccctgcttctcctgtaaaaacggcaactaccttcccggcgtcctgcacgcctgctggcgcggcagcgcggcctattccgccctggcggccgctacgctatataaaacgcgccgcatgggcacctggaaccgcctttcctcctacatcgccgtcagccgccgccagcgggagctcctcatccaaaccggaataccggaggacaaaatcagggtcatcccccacttcatccggcaaaaaaccaccccccgccgaaccaccccccgccgaaccaccccccgccgaaccacccccgccgaaccaccccccgccgaaccaccccccgccgggacgttctttacgccggacgccttacgcaggaaaaaggcgtcctcccactggttcaggcgtgggaacgccttgcccctcccggccgcaccctctacctgatgggggacggccccctgcgcggggaactggagcgctacgtcgcttcccgccgccttgaatccatccgcctgaccgggttcattccccatgaggaacagggcgccgtgcgcgccgcctgcggactggccgtggcgccctccctgtgggaggaaaccttcggcatggtcgtcctggaatcatggctccacggcacgcccgtcatcgtcaccccccgcggcggcctgccggagctcatcagccacggccggaacggctggattgcccgggaaccttccgcggacgcgctggcggaaacgctgcgcaccgccctggaggaagaggaacgctggccgtccatgggcgcgcacgggcagcagctcctgtcctccacgtattcccccgccgcatggcttcagtccatgggcagccttcttgaggaactccgcctcttccgtcaatcccccaacatcacggcatcatgaaatggtacacctgcactcccgttcccttcaaaggggaccacaccttcttttcccgtgattccggggctttctgcaaagccttccagcggatcggcttggaaagcagggccatcatgcccacgcccgtccaggagggggacgaccccgacctcatccgcacggagtacgccaacctggaagacgccgcctggtggaaatccctgggcattgacggactggtcctgtacgcctggggcacgggcaaatatcttcccatcgccagggccatccatgacgcgggcatcttcctggtggtgtacatggattcctccggactgttttttccgtggcaatactggctccccatcgcggaaaacatgtggaccagggacgtcttcgcccgcggaaaaatcaggggcaccgcctttttcctgctgcgcctgctgaaacagcacacctggaacctggccagccggggaagaagaaaacacctggaccagggggacatggtagccttccccatgccggcagccgtcaaatccattcaggaccgggaatggctctacggaaaatccatcgtccggaaactggccctcattcccaaccccatttcctccacctgccgctatgccggggagaaacgcaacatcatcatggccgtgggccgctgggacgaccttctctacaaacgccccttcctgctgatggccacgctggaacaggccctgccccgcgcaccgcactgggaagcggaaatctacgggaacatccctcccctcctccgggaatggcacggcaatcttccggaagacctccgcgcccgcatccgcctggccggctacctgcccaacgcggagctgcaaaagaaatactcccaagccagaatcagcctctgcacctcccggtccgagggaacgcacgtcgcctccgcggaagcgctctgcgccggggcttccgtcgttggtccgcgccttacgcccctgctgaactgcctgcaatggtacgtttcccatgattccggcacgctcagcccaaaagacaccccggaaagcgtctccggggcgctgctggaggaaatccgcgcctgggatgaaggaaaacgcagcccggaggaaatttcccgctactggtgctccctgctgcatgcggaaaactcctgcaagcgcatcattgccgcttatgaggccgccaaaggcggcagctgaccgctaattccccaacagggcgcgggcctctatccacacgtcctcccagcttctgtccgccagcgtcccgtaaagggggtgcccccacagccgcgcgcgcatggccgccggagaagccagccccagcagaaaacgcgtcaactgggaagggcgggccagcgcgggcttcctctgcgccgccagctccatgacggcggaacgcagttcttccggaagcggtccggggtcctccaattccatctccgcaggtactgcgccgcagcaccccggacaatgcccgcagggtccggacggctcccggaagccgaagtaggcgtccaggctcctgttgaggcaggcggaagacgtcagcgtggaaacgcacgttttccagcgttccagcccgttcagccgggaccgggaaaaatactgcgcgaattcctccgcggcttcttccgcatcaaacccttccgaatgcaagtgaagggctgtctggcgcaggtccaccttccattccccggaaaggaccagctcgtcaagccatgcgccggcttcttcccaggaaatcccccattccgcggccagagcctccacttccccctcccggtggccgtccatccattgcagccgggaacgttcctccccatcgcggccgcacaggatttcctccatccggaacagggggcgcaccttgtaatacttgtaccccatgccctgttcccggacggaaccggaacgcttcaggtcaaagagcatccggtccaccgccacatccggcaagtcatggaccgcggaggcctcatacagggacacaatatgctctcccctccgggacagcagggacgccagcccttttacgccatggcgttccggctccgccgcatgcaggcggttgaccacggccacgccgtcgcgcccggacagcatcaccagactgaaggaaggcagcccgtcgcgcccggcacggccggattcctgcacatacgcctccaggctggcggggggatggtaatgcaccacggagcgcacgtccggcttgtcaattcccatgccgaaggcgatcgtcgccaccagcacgtccgccgcccccgccaggaactcatcctgaaccagcccccgcgtttccggcggcatgcccgcatggtaggacttgacggaaaaaccggccttccccagttcataggaaagattctccgcatccttccgggtgcggatgtacaccacggcgggacggtggccgtcctctttcaaaaactgcaccagccgcgcggttttatcctgctccttcagcacttccgcctggcggaaaatattcgcccggtaaggcgcggcgcggaagatgcagtcctcctgcacgtcaaacagggcggccaggtcgcggcacacccgttccgtagccgtggccgtcagggccataacgctccggaacccatgctttttaaaaaaaacgggaagccccaggtaatccgggcggaaactgtgcccccactccgagaggcagtgcgcctcatccaccacgaacaagccgggagaaacaaactccatggcctgccgcatccacggggattccagagactccggcgcggcgaacagcaggcggacggccccggacttcaggctgtccagcagggcgcccttctcttcctccgccagggaggaatcatacctggccgcggccacgcccagcttttccagcccggccacctggtctcgcatcagggcgatcagcggggaaaccaccaccgtcaccccgtctcccagcactgccggaatctggtaacaaaggctcttgccggaacccgtaggcaaaatgccgatgcaggaccggcccgccagcgcgcactccatcagctcccgctgcatggggcggaaccgctccttgccgaacaaacgcagcgtgtcttccaacggggaggaatgcatggcgaaaatgatatcataacggaaaatcccggcaaaaggaatcctatgacattgacacggtggcttcatcctatatcctccatgcaatatgagacctttgaaaaccatcattgccggaactctggtcctgctggcggcagctcccctcacagcccagaccaaggctgcggggaataaaaagccgaacatccttttcatcatcacggacgaccacgcctaccagacgctgggcacctccaagaacgattcccccgtctcgctgcccaacttcaacaagctgggcaggcaaggcatggtctttgaccgcagctactgcgccaactccctgtgcggaccctcccgcgcctgcatcctgaccggaagacactcccacatgaacggcttcgtcttcaacggccagaggccgctggacggctcccagcccacctacccgaagatgctgcaaaaagccggctaccagacgggcctgttcggcaaatggcatctggaatcagaccccaccggctttgacacgtgggaaatcttccccggccagggcagttactacaatccggatttcatcagcctcaagccgaacgggaagcgccagacgaagcgcttccccggctacgccacggacgtggtcacggacaaatccatccaatggctggaaaaccgggacaaggacaagcctttccttctcgtcgtaggccacaaggctcctcaccgcgcctggtgccccgccctgcgccatctgggcaaggtaaacacgtccaagctgacgccgcccgccaacttccatgatgactacgccaaccgcccggaattcctgaagaaaaaccagcagaccgtagccaggcacatggcgatttattctgacctcaaggtgctcaaggaccaggtgccggaagacatgcgcaagagcatcgtctcccccggctacggctgggacctgggcgaactgaaccgtatgaccccggaagaaaagaaaacctggacgaactactacgccaagcgcaccaagtccctggtggacggcatgaaatccgggaagctgaaagacccgaaagccttcgcggaatggaaatggcacgcctacatggaagactacctgggctgcctgctttccgtggacgacagcatcggacgcctcatgaaatacctggacaaggaaggcctttccaaagacacgctggtcatctactgcggcgaccagggcttctacatgggcgaacacggcatgtacgacaagcgctggatttttgaggaatcgctccgcatgcccctcatcatgagatggcccggcaaaattcccgcgggcatccgcaacaccaccatggtgcagaacatcgactacgctcccaccatcgtttccgcggcaggagcagacaccccggaaaacatgagcaccttccagggcgtttccctgcttcccacggccttcacgggcaagaagccggacaactggagggacgccatctactactgtttctacgagaatcccggcgaacacaacgccccgcgccacgacggcatccggacggaccgctacacgctctcctacatctggaccagtgacgaatggatgctctttgacatgaagaaggaccccatgcagatgaagaacgtcattgacgatcccgcctacaagtccaccgtggaacagctcaagaagcgctacaacgaactccgcaaggcgtacaaggtaccggaaaactgccccggaggaaagggaacgcccatccccaaatttgacgcttcctggtaggaagccgttccagcggaacttttcccaggcgccggaagattccggcgcctttttattccctgcgtatcccgccccggtaacggctattccaccccggccttacccgtaaaaacctttgaggggccccaatccggcgatcttggacaatttattcacggccttctcgcaaaaagcaatcccctggtgaacgccggagagaaaggtaagcaaaggcctttccaccctctccgctccaagctctcccaaaaagaagtccggatccttatcatcaaatccggggtgccgtaaaaagggctgcctcccgtcaagatggatgactcccttcccggaataaaggcaatccagatggttcatggccgcaacaagcgaccacagcgtctggtcatgcgtatggtccgcaaaattgtcacggcagcggcttttttcctccggagtcggggaagacaccaggctgaactgccggcatagttccatccattcacgaagaatccggacgctttcttccgattttttcaggaaacacggagtcggctgaatcagggggctatgctcgaaatccctgatatccagattcaatgcgtcaaaaacgctctgcttgcaccaccttgacaaatctcccgtgtaataggagatattcactcccggcaggatatcctgccccttctcctccagccattggacaagaggctgtactgaatggcggaaaagcgttcccggcggacgccccgcatccgtgtaaagcaaatagtccccttcctgcaggctttccagttccctgagcatgatgaagggtttccagcaccagtaaccagccccatgcaaatgagggtcaaaccagggcacttcgcgcctgatgcctgcggacagcaggcggccaagattccagaaagacaattccacggaaggctccgccagctttaaacttgtcatccgcatccactgccgccagcggtagccgcgtgtcgcgaaagaacaataacgaatagccatgcgcgttgattccgggtaaacgcatggccgggtagaacatgggccatgctttctgcacgccctttctagcgagttgttaatccgctgtcaatggaaaattttaacggagaacgaattccagatatttgacgtgtaataaaaaagattttccatcatccccgtaggatggcctgaacagacaactttttcagggttatatttttacaggtcctcttttattttctccaaacaagcggattaacaatccacagcgttggccggatacttgccgataaaagtctttcttatattcccgcgtccgcggggggcgcccttatggctgaagctccgcgtccagcctcttgtccaggtccatggcggcgccgatggccgcatccatgttgtaatattcccactccgcaaaacgccccagcaggtaaatgcccctgggttccaggcgctccttcagctcccggatcagggcgcggctggacgcatcctgcacgggataggtgtattcctcccagtgatgggccaggtaggagggtgaaaagggaataagctccaactgccgcctgatttcctcttccgtcatttgctcggaaaactcaatggtggcggtggtaatgtctccgttattgttgttcctggaaaaattccccgtgcagatgatgcggtgggaacggtggtccggggagggcatgtaaatccagctatagccgttggggtcaatccggcacagcacggaggtggtgccgtgggagcgcaatgccgaaatttggggaaggaacggacggagttcatccacgccgggaaagcagtccgcaagctgcctggcattccctgtaaaaacaacccggtcaaacaattctccctgcacgagccattttccatcctgcgcacggatgtccgcagcctccgcccggtacctgaccttcaggccgcgcgccagcgtatccgccaggaactgggagccgccgcgctttgcataaaagaaggagctgtgcaccatggcgctttcattgacgcgaccaatgttattcaacaggatttccgccacggtcggcatgggcagcttgtcttccagccagtccatggcgattccgttgatgtcctgccgccacaccttgttgttgtagggcgtgaaataaaggtcgttcagggtcttcccgaaacggttccggaaaaattctcccaggaaactgggtttcgcagggggattcctgtaaagctccagcagttcatggacaatggaggaacggacggcctccggaaactggtcgagatggttctcaatgggataatccaccacagccccgccctccagggaaatgacggcacggcggcgggcggaaacaaaatcacgctccttgtcaaaccgggaccagaaccagtccaatacctcctgccgccgggaattgaacacatgaccgcctaccaggtggtacaaattgccctgcacctccgcgcacttgactaggccgccggggcggctgtccttctcgtaaaccaccacctcatacccctttttcaagagcattccggccatggacaatccggaaactccggctccgatcacagcatatttcatcatggaataaagaaaatcaatggattaaagaccacgcgcaccgaatttggacaatttcacgggatggaggtacaggtattcctgcggaaaggaggcaagcaatttgcccaggtctccgccggaagaggacaccagcccatcaatgacggcattcatggcctcaaaatgttccggatcctgcgggaaccagacgtttccggacttgtactgcgtgtcttccagcgtagccagccgcgttccgggaaggagctgcaaggctgtgggaatagcaagctccacaaacatgttccatgcggaaaatacctcaaggatgcggcaaaaatcgtcaaacttccctttcggaatgcacacgatgtccgaataaccgaagacgacgggataggaataccggtactttttgatccggtgcttccagtggttcagcagatgccagattctgcccttcagcaccttccagttggcatggatgccgccgccgggattccacttgggcaggaacatgcgcacgcgggacagctcgtcatgctgcatgaggttcctggatttcaaaatctgacgggcttccccgtacggcggaacattcttgttgacgctgtccgcatcaatgccggcgggagccgtggaaaaacggtgggcctccaccgttccacggtagcacaccggcagggagacatccacaaaaccgtccaggtagcacgtatcctccccatggattcccagcagggacggcgtggaaaactcgtcaaaccggggattcaggagcaggtcgtctccgatgatgagaatataatcgccatccagattcctgattctttcccgggcctgtaaaatataattataaaactggaatgaattgccgaatacggaacatacgtccggagcgtcccccctgtaatagggcattaattgaagcagcccggaaaaacgccttgaataaatctccctgattaccggaatgttgcggtcatactggtggttgaacaacacaacgagagccgttttccgggaagaagtatccatggtacgtttgatgtaggggagcaaccctcgcccttcaacggaaggcattggaaaaacatggattgcaccctgggagcatgcgccattaaaacggcttcatgaatacattacggatttgaaatccggggtcaagcctgcacatttgaaagaaaaacattttcggaaaattccgtttgccaatactccggcatcgacagaggccgttcttgacgtaaataagctttcttttcatttcaaaaaagccgggagggtataacacaaaaaaatggcgcaggcaggaacgggaacggcgcgacggtgatgaacggcgaagctgcggctccggctcccgggaacggaagattccggcctctcgtggctgaaaccccttccggagcatggcgtaagctcttgcttgcataaccgtctctgcgctccggagggaatgtccatcaggcccgggaggccctggctcccaggcgacatgcacccgtgaaaaagaactgatggagcgttgattcaggatttgcgcccaccatcccggagcataacttttccggactgcagagtctcaccggatttcaaacccgcccgtgaaacagggctgttttaagcctgcaagcaagccgcatgataccagcaggaaacaagccggtgctactttaattttcccgaattcctccctgcgttccggaaccggcttcttcttttctccggcagtggtgtgttcaaggggaaacgttgagttggaatactggctgatataacaggaaagcaaaacatgaagctcactccggaagaatatttctttcattccctccatccagggcgcggaaccaaaaccccattctgcgccggaaacggacttcattttcccgctccttcaacaatggccgatgccggaaagcattttctcccctcttatcttttcacggaaaaaacagtgggcacacctgaattccctcccctgctccgccgcgaaaatggaaaaagccgttccaccgggaaagcttcccgatgaaacagccggaaaacggagccccccgccggatcaatacctgtaaaagtccggcttgtacgggccttccaccggaacgccgatgtagtccgcctgttccggacgcaggacggtaagcttgcagccgatcttgccgaggtgcaggcgcgccacctcctcatccagcaccttgggaagcacttccacgcccacggggcggttttcacgggtattccacagttccagctgcgccagaacctggttggcgaagctgttggacatcacgaagctggggtgccccgtggcgcagcccaggttgactaggcggccttccgccagcaagtacaggctgttgccggacgggaacgtgtaacggtccacctgcggcttgatgttcaggtgcttgatgccgggataggtctggagcttgtgcacctggatttcattgtcgaagtggccgatgttgcacacaatggcctggtccttcatcttttccatgtgctcaatgcggatgatgccgcagttccccgtggtggttacgtaaatgtccgcccagcccagcgtgtcctccaccgtcagcacgcggtagccttccatggcggcctggagcgcgcagatggggtctatttccgtcacgaccacctgggcgcccatgccgcgcagggactgggcgcagcccttgcccacgtccccgtagccgcagaccacggccaccttcccggcgatcatcacgtccgtggcgcgcttgatgccgtccaccagggactcgcggcagccgtacaggttgtcaaacttggacttggtcacggaatcgttcacgttgatggccggaatcagcaggcgtcccgcggcctgcatctggtacaggcggtgcacgccggtagtcgtttcctcggaaacgcccttcagctcgggcagccagcggtggaaaatgccgggcgtttccgcggcgatctttttcaggaggtccttgatgacttcctcttcttccgactccgacggggtgttcacccagccggaaccttcctccatctcatacccgcggtgaatgagcagggtggcgtctccgccgtcgtccacaatcaattgcggtcccaggccttccagaaagttcatggccttccaggtgcagtcccagtattcccggagcgtttcccccttccaggcgaacacgggcgtgccggatttggcaatggcggcggcggcgtggtcctgggtggagaaaatattgcagcttgcccagcggacggaggcgcccagggccgtcagcgtttcaatcagcacggccgtctgcaccgtcatgtgcagggagcccatgatgcgcacgcccttcaggggcctggcggccgcgtacttttcacgcacggccatcaggccgggcatttcatgttccgcaatgtccagttccttgcgtccgaaatccgccaggctgatatcgcgcaccttgtattgttccgtttctgaaaacatgtctgtaaacgttgtcgttggattaatgaagaagttgtttcagggaggccaggcgcgtttcgtccagttgttcccagggaagctccggattggtgaaatgcccgtagtgcgtcgtcttccggtaaatgggtcgcagcaggtcgagctggtccaccatgtccgcaggcttgaaggagaaaatgccttccagcgcgctttcaatggctttttcctccacctttccggtgccgaaggtatccacccggatggaaacgggggtggggtagccgatggcgtaggccacctgcaattcacacttgtccgccagcccggcggctacgatgtgtttggcgacccagcggcacatgtacgccgcggaacggtccaccttggacgggtccttcccggagaaggcgccgccgccgtggcggcccatgccgccgtacgtatccacaatgatcttgcggcccgtcaggccggaatccccgtgggggccgcccaccacgaatttccccgtgggattgatgaagtactccgtcctgtcatccagcagttccgcaggaagcacggtcttaatgagtctgacgcagtaattgtaaatcgtatcatggtccacttcctccgtgtgctgggtggagataaccacgttctcaatatgcacggggcgtccggcctcatcataggccacggccacctgggacttgcaatccggtcgcagccagtccacatgcccgcgcttgcggcgcttggccagttcaatgagcagtttgtgggcgaacacgatgggggccggcagcagctccggcgtctcgttcgtcgcgaagccgaacatgatgccctggtccccggcgccctgctccgcgtggcccttgccctccgcttcccgcgcgtccacgccctgggcgatgtccggagactgttccgtgagcaggttcgtgaaaaagacggtatccgcatggaacacgtcgtcgtcctgccggttgcagtacccgatctcccggatggcctggcgggcgatcttttccggattgattaccgccttggtcgtcagctctccggcgatgatgaccatgttgctcttcaccaaagtttcgcacgcgacgcggctagttttgtcttgagccaggcaggcgtctaaaatagagtcggaaatgtagtcggccaccttgtccggatggccttctccaacggattccgacgtgaagatgtgagggttgtttttactcatatcgataaatctcgatgcgttgatatattattctaccatgaagtcaatcctaaaaacgctcaaactcctgacggaccccacccgcctgcgcatcatcaacgttctgaatgaagaatccctgagcgttgcggagctccaggaaattctcggcatggggcagagccgcatctccacgcagcttgcccagctccggcaggaaggagtggtggaggacacccgctccgggaaaaacgttttttacaccctctccctggccaacgacctgcacaacgtggccctgaaagcctgcgaggaactgctggaggcggaaacggacaaaaaagccctccaggtcattctggacaagcgcaagaaccgcacgcaggcctactttgatgaagtcgtttgccgcctgggcaagaactacgctccgggccgttcctggaaggcgctggccggagccctgctccgcatcctgaattatgacgtggtggcggacctgggcgccggggaaggcttcgtctcccagctcatttcccccagcgccaagcaggtgatcgccgtggacaactcccccagcatggtggaactggggcaggaactggcgcgcaagcacgggctggacaatctggaataccgcctgggcgacattgaaacgccgcccattgatcccggcaccgtggacctggccctgctcagccaggccctgcaccatgcccaaaagccggtcaaggccctggaagccgcctggaacatcctgaaacccggaggctgcctggtcgttctggacctgctccagcacgggcaggaggaagcccgcgaactctatgcggaccgctggctgggcttcacgcccgccgctctggaaagcatgctcaaggaagccggcttccggaacatccatacggacattgtggacagggaaccggaacctccccatttccagaccctgatggccgccgcctggaaaccgtaaccggaaggcgccccactcctttttccaaccgttttttcagacaaaattctgccgggcaaccgctcacctattgtgagcattaaatccgcattaatcatttcaggcgccatcctcgctgccgccctgggcatttactggatagccgccccgagggaagcctgtcccgaggaactgtaccggcaatacatgcagctttccccctttgagcaatttgaccagaaggagaaactgttgaaaaaagcggcgcaggctggctgcattcccgccatgcgccaaatggcggatcataacttcatctccaaaaacgatctcaaagtcgatgaatacaattactggattaaaaaagcgacggaccatggaagcccgcaggcccagtatgaagctttcacggaatgcatttccgaaaacccttccgaggtcctcgcttatctgatacaggcggacaggcagtcttacgcacccgcctccctggaactgggacggctgtatgcctgcggagacgaagaatacggcatcatgcgggatgaacggaaagccatggagttttaccaaaaagccgccgcgctgaataacccggaggccctttacctgctctacctgatgggaaaactggaaattccgtccagggaggaagcggaacggcacccggacgcctatgcccgctatcttcaacaggcacagcggcagaaagcgttcccgatcatgcctgccgccatggacggagaggtccccgcgaaccgtcaatccagggagcgtatcagggaagttttaaaaacctacctgccgcaaaacccgaaagctgttgaatggattcaacaaaactacaggtgaaaaacaggccatgcctcattccctgtcctccggagccctttccgcaggaaaggggcgtttgccggattggagggcctcccgcacttcccggacaatgtccatcatctgctccggagacagctcctctttaccttccacctcttcatccaccagcgctttcatttcctccagaagatgctccggctccagacggtagttcagcaatacccggaaaagctcccttccggccttctgcaagggaacggacggaaaatcccgcacgcttttcaaatctttttcttcaaaggaattcagcagtccggcataacggcggaacgcgcgtttgaattcctccgggcagccggccaaatctaccgcggcaagataccgccggaaggaaatctccgctttcaggtgaagggcggcttcccccgtggactccgccagccacgtttccttctgcttcaaatgtacgagcagaagggccttccgcatggcttccctctgcctgcccttgggccccttcttcaatttaaccaggtccaggtccagctctgcggcatccggactcgccacatcctgggccggagacactccgagagccgccgccatcagaacaaacggcagccacttcctcatgcattcccggatatggaccattgcggtcagcaattacatgaaaaaagccgtaaaagcaatccaaatccagcgtttcccggaggagagggccatccgcacccggagaaccgccagagcgcgggtcatgccatccggggagattgacggacaggcggctgtatgagaaaaagcggtctatgctattcgcagtagtgattttcctttccgtggtcgtgctcggcgtcattgccgcgttgcgcttcaccaagggcgtcattccgctgcgtacctacgaatcgcgggaattgccgggatttccgggtccggcggggctgattcaccgcctggacggcgcggaaaaacgccagcggaaactggcggaggcccgttttcccggcgtggatgaaaacgggctcatcagccttccccccgcctgggagggcaaggtgactgcgggacgcctggcctgcgtggcccacacctgggccatgagcagcctggtccgggaagaccctgctgcggccaaagcccgcaaaaccgccgcagcccgcgccatgatgattcccttcttcacagccctcatcctgctggggatgctggccaccgggctgttgaagttccagattgcgctggctatcgggctggcctgctgggccttcttcaccttctccgcccttcccacccagttccgtgaatggaaggcagcggaaatagccaaatccgggctgaaggaagccggattgtggcccctgctgccctcagacgccatggccgtggaacaatgcctgaaagcattgtcatggtgcaatgtggcgggcttccggcgcattcttcccagataggggatgcgccgtgacggaggcgcgcatttttccggttaatccggcttttgagagaaaaaaacttgaaacgggggtgcgggtaacccactcttccaccgtcgtcaaaatttactctcttctgcatgaacgagtccgccaaccctatcatcaagtacttttccgagttcaaaatcctaaaaaccgtatccaaagatttctggctcaccaacgtcgtacagttcttcgacggcatggcctacttctccctgattacggtttttgtcctctacctgacggattactgcagtttcaacgatgcggacgcggccctgtgggtggggctgtataccctgttcatctccgccttcgtctttgcggtgggttccatctgcgacatcatcggcatacggcgcacgtacctgatcggcttcatcatcctcatcgccgggcgtctcatcatgggcttcgggccggacctcagccccaccgtggactccgggaggctggtggtcatgacagggattctgatcatgtccttcggcacggcgttcatgtcccccgtcatccagacctccatccggcgcttcgccccgctgaatgcgcgcgccacggggttcaatatttattatctgctgatgaacatcgccgccgtgatcgcgaacgtattcctgattgaattcttccgcaagcacttcggcgccgtggacggcggctactggatcatcaacttcggcacgctgatggtgctgctgggctgcatcaccacccgcttcattgacgaagacaactacgcggaacccagtgaaaaggaggccaacctgaaagcgcccctccgccggcccctgcagcttttccgggaagtgtggaaggaatccgccttccgcaagctcatcctcttcctggtgctgaccatgggcgtgcgcatcgtcttcacgctgcaattcctggtcatgcccaaatactacgtgcgcaccctgtatgatgactttgccatcggctccatcaatgccatcaacccggccatcatcgtttccgggcttatcctgctcattccggtgctgggacgcttctccaccgtcagcctcatgatcgtgggcatgtccatttccgctttctcccttgtcttcatggccattcccattgaatggtactatgtggtgcccggcattgaaacgcgctcccaggcgtatctggtagccattgtgacgcagattctggtgttcgcgttcggggaactgctgttctccccccgtttctcggaatatgtggcccgtgtggcccccaaggacaaggtggcctcctacatgtccctggcggcattgcccatgttcattgccaagcccatcaacggcatcatcggcggcctgctggtcgcctacctctgctacgacggcatctgcgccaagatggataccgggcacatcggcttctgggattcacccgaattcatgtggaccatttacctggccatggccgtcatcagccccatcgccatcatcatgacccgcaagaccatcacctccgaccatccggaggaagacgcggactccccgcccattgcggccattgaaacggaaatggaccccgccgttacggcggaagaactcacggaagccaactcctaacctctcaagacgatgaaccagcacacgcgcaacatcattgtggactccctcatcctggtggctttcagttccattctgggcgggatcagcctggtggtttccaaatccttctccggagaccccaatccggccctggacctcatcaccgtgatgaaaaaagcggaggccaaggaagtcaatgcgtcttccgaacaggaggaacaggaagccagagtcaaggggatgaaggaattcgaccaaactctggaagaaggggaacaactggcggcgaaggaaggaaaagccttcgtcaacatgacggacccccacggcagaacgcccgtcatgtgggtgtgctacgccaactacaacaacattgaaaccacgctgaagctggaagccaagcgcgcgccctacctgggacgcctgctggaagacccccgcgtggaaatcgaccagaaggacaaggacggatggaccgccctgcactgggcgtcctggagcggcctggaccgcttgtccgacatgctgattgaaaagaaggcggacatcaacaaccgggaaggcaacggctttacgccgctgatgctggcggccatgcgcggcaacttccaggtggcggccctgctgctggaaaaaggggcggacatgaatgccgtcaacaaattcggcaagaacgcccttcaactggcggaggaaggggcccttgcctaccaatccagctttgacctgaccaagacggaagtttccaaggccccggtgaacacctttgcacaggcttatgaaaaagccgttggggctctctcgcctgaacacgcccccgaattcatggaagccatgaaaaaggcggtaggccgccagtcctttgtggaaacggagtacgttctccagctcattacgcgctccctgatctccaaaaacctgctcacggaggaacaggccggaaaattcaaggaggaaatcaccggggccgtagcggaaaactcccagatcattgacgtgcgcggcgtagcctttgaacacaccgtggacctgctccgtaaagcggctgggaaataacagcccggtttcttcaaggttccgacatccgccactttgctcttgacgctttcacggctcctttctaggattcacggcataccatggttagagcattgcgcaacggcatcatgctgctcacccttctgctggtcattgtaggcggaacgggcatggtttccgtatgcccctgccatcaggaggtcttcctcttttcctgctcctgccatcacgatgccgcaccctgcggatgccgtggggaccacggtcccggcagcagcacttccagcccgctggccgggcacctctgcgaacaccagcgtctggagattgacgacctgacgctgcccgttcttcatgcgccgcttccccagccctgcattatctggcagaccttcccggatttccatcatctggcacagtctcttcttttaacaagccaaacatcggattccgcaatacccgccccccctgaccccttcagggacgacggcccgatacatgaaggctttcaacttcccctgctgatttaacggccctttttcagaaacgtcccagggacgtttccggctgaacgctacttgttgattgcgtccggccttatttgtttccgcggaattatttgccgcattgtccaaacctgattggaccgaactatttctattctctttttcatcatgaaatccataccatttttcgctgggctaggcctgaccgccttcctcagttcatgcagcgtctatcacagcgcacccatcgacctgaatgcggaggaagcctcctggaaagaggcatcccgcgtggacacacacatctccgttacccggaaccaggcacgccagatcggcctggtcatgaatccggatctgaacaaggcacgcctgaaactggcttccagcaatgaagcagccaaacaatcgggctggtggaacgatccgtccttttcctgggatattgaacaagtcctccaggaaaatacgctcaacatgtccggcagcctgggcttcaccattcccgtgacgggtcttcccgccctggaaaaaaaggtggcggagcagtacaaggaggcggacttctggaccctccgccaggcggaactggattttctcagttccctggaccaggcctggagcaagctggccgttacccagcgccgcaaggccgtcatccgggaacgcctggatgcggtgcggcaggaaaacggcgtgattgaaaaactcattggcgcaggggaagtgggattttcctcccgccaagtggcttcccagcgcatgaacgacgccatccgggaactccagaccgtgacggaaacggaactggagcagaagatggagctggtcaggctgatggggctgcatccctccgcggcacggaagctcggcttcctgacgggacagggcttccaactgcctgccgccgttccggcccccggccccgccgccctggcctcagccccgaaaatcaaggcccaactggcaacctacgccaccacggaaaccctgttcaagacggagatccgccggcagtacccggaactggagctcgggccctccttcacccgtgacgacggggaaaaggaagtgggcggagaaatagggttcaatcttcccctctggaaccgcaaccgcaaggccattgcggaagcgcgcggcacacggaacctgtccaggcaggaaaccatccagctttggaaaacggagttgttcaacgcccgacagcttgacgccagccagcagatggtgctccgccactgccggacggagcttcagcgcatggagtccttcgcctcctccgtccggaccatggaaaaactgcacggcatcggggaagcctccctgctggagctggcggaaaaccgccaccagctttatgaaagccgtctggctttcctggacaatctggacaagctgctggccattcaggcccagctgcgctacctcacccacgccaaccttcaatccaaataaaaatcttcatcattttaacgaacatgaaacgtctctatttttccatcatcctgggcctgactcccgttttcagcctcaatcccgcacgcggagagcagccggcacctacggaacacaaacacgaggacggcaccgcctgcacggcggaccacggccatgaaggccaccagcacaaggaaggggaaacctgcgccgagggccacgcccatgaggaacacaagcacgcggacggctccgtctgcacaggcgaccacgagcctgagggccaccagcatgcagagggggaagcctgcacgggcgaccacgaacatgaagaggccgcggagaaaggttccggccagccgggggacatgattcccgtgcatgtggatgaaaaggcgcgccattccctggacatgcgctttgaaaaggtgacggaagccactcacggcgcggaaaagacccttcacggccagatggttattcctccccatgcggtaacgacgtacgcccttcccgccgccgggcgcgtcaccttcaacgtcaagtccgcccagcaggtacgcaagggggaactgctgtacacgctggcctcaccggacatcgtggagatggaaggaaacgcctcccaggcgcaggctgcccttgaccgcgccgcggcggaactcaataccctcaaggaacgccgggcccaactggaaaaaatcggcacccgtaacagtgagctgaatacttccattcaattcaaggaggcagaaatccacagcctccgcgccgccctggatgccagcaataataaactgaagctggtgacggattccggagctttgaaaaacaacctcctttacgtgtacgccgcggcggacggctccgtccagtccgtgaacatgacccagggttcctggggggaacagggcgcgcccgccctcgtcatgaccaacaagggggaactggaattcgccaccaccatttacggggctgaccccgtccattatgcgaaggcccagctggccctgaccagcggaaaaaatacggaagtgctggacggcaccctgcgggtggcggaccaggtggaccccgccacgcagtcccgtgccctgtacttcgttccggaccgcatgccggaagggacgcatgccggacagcttgcccggctggacctgtattcccatgacgccgctacggacggctttattcccgttcccaacagcgccgtcgtcaaggtgggggtgaacgacgtggtcttcatcaaggcggcggacgataccttcgtcatgaagaaggtggaaacactgcccgcacggcagggaaaaacgcccgtcaaagggttgacgccgggacaaaccatcgtgaccaaaggcggctatgaattgaaatacatcctgcccacgggagacgccgggagcaagaaggcggccgggcatttccatgcggacggccagttccacgaaggagaacactgattttcagctcaacgtgattagaaaacagttaatagaaacaggaattcgatgaattttctaatttcattctgcctgaataacaggattaccgtgattctgctgacgctcgcgctggcggtcatcagcattttcgtggtgaaaaatattcccgtggacgtgtttccggaactgaaggttccgcgcgtcaccatccagacggaggcccccggcctcaccgcggaggaagtggagcagtacatcaccattcccattgagtccgccatgaacggcaccgccggggtcaagggcgtgcgctcctcctccggcagcggcctctccttcgtatgggtggactttgactgggacaaggatatctaccaggcgcgccaaatcgtgacggaacgcctgggagcggtccgggagtccctgccggaaggcacgtccccggagctggcgcccatcgtctccgtaacgggggaaatcatgctgatcgccctgacgggggacaaggacacctccacgctggacatgcggcaattggcggaatacaagctgcgcacgcgcctgctggccatccccggcgtaggacaggtcacggtgctgggcggccgcctgccggaataccaggtggtttacgatcccaacaagctcaagctggcaggggtggacctttccagcctgaaaacggccattgaggaatcccagtcttccgtgcccgccgggtacctggaggacgtggccgggcaggagctccccattcagcaggatacccgcaccgccaatattgaacagctgaaccgcgccctggttccggaccacgcctccggcattctccggcttcaggacgtagcggaggtcaagatagacggcgcgccgcgacggggcgacgccgggttcatgggggaagacgccgtggtgctttccgtgcagaaggtgccgggagccaatacgctggccctgacgcaggctgtggacgcagccgtcaaggagttcagccagagccagcttcccaagggcatgaaactgcatacgaccgcctaccgccaggcggatttcattgaaatgtccctggacaacggcacggagaccctgctcattgcgggagcagtggtcatgatcgtcatcttcctgacgctgctgaacctgcgcacggccatcatcacgctgatttccatgcccctgtccgtcctgttcgggatgatgatgttccccgtcttcgggctggccatcaacatcatgaccctgggcggcctggccgtagccgtgggggacgtggtggacaacgccatcattttcgtggaaatagcctggcggcacctgaaccggaacgccgccctgccggaggacaggcgcaagagcaagtatgaggtgctgatggaggccaagggggaaatcgtgggttccatctccttctcctccgtcatcatcctgctggtgttcacgccggtgctcttcctgtccgggctggaaggccagttcttccgccccctgggcatctcctacatgctggccctgctctcctccctcatcgtagccgtcaccattaccccggtgctctgctacatgtggttcaagaagagtaaaaacgccgccacgctggaaagcggggattccttcagctcccgccttatcaagcgcatttatgcgcctatccttgagttctgcctgcgcttctccaagacggtctgcgccatcatggcggccatcacgctgctggcgctgtggctggggtccaccttcggaaccagcttcctgccgccgttcaacgaggactgctacacggtcttcgtcagcacggtgccgggcacttccctggatgaaacggagcgcatctcccggacggtgatgaaggacattgaacgcattccgggcgttctcagcgtcacccagcgcacgggacgcgcggaaaacgacgaacacgcggaacccgtcagcgcctccgaactgctcgtgcgcgtagacctggagaaggaccagaaggaactgcgcgccgccatcaagaagtgcattgacgatattcccggcaccagctccatgatcggctatccgctggcgcaccgcatcagctccgccctctccggctccaactcggaaatcgccatcaatatttacggcacggagctgccccagctccgcctggcggcccagaaggccaaggagattctggcaaagatgccggaagtggcggacgcgcgcgccaaccgggaaatcatggtggataccatccgcgtgcagtacaaccaggaagccctggcctcccacggcctgaccatggcgaacgccgcggaacaggtttccacggccatgaacggccagaagctgggggaagtgatcaagaaccaggaccactggaacattgtcctgcgcattgatcccaggctgaagacgtccattgaagacatcaagaacctggaactcatttcccccaataaaaagaccgtgcgcctggccgacgtggcgcaggtgtaccgggaggaggtctccaacctcatcctgagggacaacaccatgcggaaggccatgatctcctgcaacccctcccccaattccaacctgggggacctggcgaaagcctgccgggagcaattggacccggtgatgaacgccatgggctgcacggtggattatgacggcaccatcaaggcgcgggaatctgcctccgagcggctttacgtgctgggggccatcgtcatggtgctcattgtgctgcttctctcctctgcgctggggagcgtccgccgcgccatgctgacgctggtgaacattccgctgtgcctggtgggcggcatcgtagccgtgttcctggcttctcccggcacgctgtcctccctgttcggcgccgcgtacattccgcccatcctctccgtggcttccatcgtgggcttcgtgacggtcatcggctttgccatccgcagcggcctgatcctgcttaacaggtaccgggcgctggaacacaagggcatgaacccggcggaagccatccgggaaggttcgctggaacgcgtggttcccatcatcatgacctcccttacaacggtgctcggcctgctccccctgatctgggccattgacaagcccgggggcgaactgctcgggccgctggccatcgtccagttcggcggactggtttcagccaccatcctgaacctgctcatcattccggccacagccaaactcttctcccgctggatttcctcccgccggaaagaattggaagcaacctcctgatccattcgggattccagcggcggaaccggggaaggacgaggccccggttccgccttttacaatgacagacgtaacaagtccttgccttccgggccgataaggagcacacatgggtgcttaagcttcaccgtcatgcccaaacggaaatccaccagagagcacctgctcaatacgggagccatgatcgtcggggaatccgggctccgcgctctcaccatccgcggcctgtctctgcgcgccggcaccaatacggggagctttgtctatcacttcggcaaccgggaagcttttctgaacgaactgctggaacgctggtacgaaccgttgttcaccggcgtcagaacccacgccaacattcatcttccggcctttgaaaaactggaagccatcctggaagacgtcatggagttcctgctgcgccacggccagttcattgctcagctggtgctggacgccctggcgggagaacgggcggccatccgcttcatttcaggaatccatacgcgccaccccctcgtcctgctggaaaccatacgggaagcccaggaggaaggttccgtgctccagggagaccccatgaacatcctcatctacctcgtctgctgcggcggggctccttttatcctttccggacaactccaggtgcacgacccgaatgccgtgcggcccgtgctggatctgctgggctccatcctcaatgacccggaaagcgccaggcagcgcatgacctgggcgctccgcggcatccgccagtcctgagaactctaccggactccggaaataccacgttgcgccgcgctcttcccgcaaagctggagcgccgcaggatttgcgggccatgggctttcccttaccgcctccaatgggggcggtggggcggacggggcggcggaggcggaggattgtggtgatgccagtcattgcgatacctgtccttgtcgcggtcatgctggaccgccgcgccgatggcagccccggcggccagcgcgcccacgccgatggcggcggccccgccaggcgtcacggtgctgtttccgtaactgtccgtcgtgcaggacggcatcagggaaagagacagcccggccaggggaaggagccagagggatttgatatgcttgttcatggtgtgaaatattggtaatgccggcagcccggcttacatccagtaagcgcggcgtgcccgcatgatttgtttaagcatgtcacagcccggagagaaattcccggaatcatgacgcctgttatgcacagcggaccctttggaacgccctgttccggcgctcctggacacgaaaatccgcatgcgctgcaaaagaacagacatgcggatgtagaaagcgttcatcttccggaaagctccggaaaagtccgcccggattatttctgctccgcagcgggttcgatgcggacggggctctgaatatcaaacaggctcttgcgcaacaggtagcctccgcgctggaggacaaacgcgctggacgggaacttttccgccaattcacggtaaaaggctcccgcggcggcattgtccttcttcgcccgggcaatgtcccccaggcacatggtggcaaaaccggaaaaagtgggatcccccgcgtccaccacggaacggaacaggccatccgcctcatccgccttcccgcggttcatcaggcggcatgccagggtaacggaagcctgggccttccattcctccgtgggagcggaatcaataaaagctttcatcctggctacgccttcatcctccttgccggcgttccacagggcgaccgcctgaagataggtggcggtgacggcggcgcgggaatcgtcaaaatccgccaccacctgctgaagcccctgttcattcagggagatttccccggtagcgggggattccggcatggcggccaccagcgcggcgcctgcctttctttccatggaatcctgcatgccgttgtaaatgatccatccggcggctccgagaacgcacagcagcacgaccagcgcaacctttccgtagtgttcatccaaaaactgttcatgcttggccggaccgacggagatttccgcaaacgcgcttccgtcgcccatcggcatgttgtccatggcccgtttaatatccttgatatccataatatgttgaagaggtttctatcgtgttgtcccggccaaatcaatcagctttttacttatcttcgccatgttccagaagctggagggaatccttcaggcccaggttcctgtagatctgccgcgtggcgcggctctggttgagcgtataaaaatgaatgccgtccacgccggaatccagcagctccgcacattggctggaggcgtactggatgcctacctcctgaacggcgtccggattggagccggcgcgtttcagcgccttgagcagccgggccggaaaacacgtgcccccggaaagctccgccatgcggttcatgccggacaggctggttacgggcatgattccggccagaatgggcaccttgatgccggccagcaggcaacgttcccggtaatccagaaaagaatggttgtcaaaaaacaactgggtgcagatataatccgcgccggcatccaccttcgctttcagaaaatccatctcgcgcaggcggttgggcgtggacggatggccttcagggaagccggccacgcctatggcgaacccgtccggatcaggatggcgtccggattcgttatattcacgaataaaagccaccagttccgccgcatggcggaaggcatccgcatcacggttgtaattttccgtgccgcgcgggggatctccccgcagggccagaacggcccgcacccctgcctgggcgtactggtccagaatgctccatacttcctcccggctatggcctacgcaagtaaggtggggcaccgtgggaatgcgggattcatgctggatgcgcagcaccacctcccgggtaagctcacgggtggagccgcccgcgccgtacgtcacgctgacaaaactgggatggtacggttccagttcacgaatggtctggtacagggccgccgcagcctgctcgttcttgggcgggaaaaattcaaaggacagactggggcctgcgcccgactgcaatctttctctcagatgcactttttctttatttggcttggctctatccggacccgcattacggctccatgggaatcatcaccggctggggagccgacgcaggagcgggagcggcagacggggccgcgccgggctcgccttctcccatcatgttttcctgccagcttgcgggcgggacaatcacttcatcccccggcttgatgggctccttgtcattgttgtcaaaaagcgtgttgcgcttcacgtaggactggaacaccttcccgtccgggtcaactccgtcgataatcagggagacaaagatgcttccgcgcctgcggatgcccagttcctgccccactttcaggtcaggctggccaatggactggaacaggacaaggttggcgtcacggtagtattccgtcacgcgtcccacctgttcggcgtccttgatctcattgagccattgcaggcgggggtctcccttttcaatgctccggcgttccagcagggcgcgttcctcctccgccatggcgtggcgcttcttcaaatcttcattctccttcttcatccgttccagctcggccgtggcatgggccagctcctcgctcaccaccgggtccgccacgactaccggctgaacggcggtgccgggcgtctgggtgggcatgggaaggtaaggagagggattgacggctgccggagcgggcacgggggctatctgctgctgttgaatcacatccatccttgaggaaatgttcacatagatcattcccagaacggccagcaccaccaccaggaacaccagaataaggatgcggaaattgctcatgtcgtcaaatggtagagggattattgaataaaattagtaggaatagttgagatagaactggaattgtcctccgcggtcgatggcgttgttcttctgaatcggaatggcatagtccaccgccagaggaccgatgggcaggttcaggcgcaggccgatcccgtagtcggaaacgatcttggatgcgctgaagtcaaaggcgtccccgttgacgaagccgatgtcgtagaacacggcgacgcgcacttcttcaatcaccggaatggaatattcaaactggcagaagaaggaggaacggccgcccatcgtttcatcaccgctcaaagccggattgtacggagccacgtcccggaagcggaagccgcgcatgttgtacgggccgccgaggtagaggcgttcaaaaatgggtacgtcatggtcgccgtaggaatccacggtggccgcaccggcattgatgctgaaaatggtgtctccgcgcaagttccagtaataagagccgttgatgccgaagttgtaagtcttcacatcgccgcccaggccggaataaccggccagcacttcaaacttgccgcccttgcgggggaagatttgcgcgtcacgggtatcaatggtgtaggaaagttccacgtggctgcgcaggtaatcgccgtcctgcagccagaagaagatgggggcgttacccttggcgtcaatctggtactgttccaggcggtattccagcttcacgtaatccagttccccgatcggtttgcgcagggaaacggcaaagccgtagttctgctggtcgtaatagtcggagaagtacgtggaattgctgtagaagatttccgtgccgaaggccagcttgcggtgcaggaaccacgggtccacccaggagatgctggcatcctgcgtttcaaaacccacgcgggtattgatggcgaagcgctggccgccgcccacgaaggaggaccagtcatacatgtcgaagttggactgggtgatgcccgcgaagaggtacacgctttcaatggaggagaacgccacgccaatgttcagggaaccggtgcgtttttccgccacttcaatgttgatgtcacggtagccgggccgcgtggaacccacctgggccacgtccaccatgtcaaaatagttcaggttctggagacgcttctgggcggtatccaggtccacggaattcatggggtcgttggactggaggggaagttcctggcggatgacgtaatccttggtgcggttgttcccggtcaggcggatgttgcctacgcggtaggggctaccttccgtcacatggtaaacaatgttgatctgcccgtagccggtcctgggatcaatgcccacttcctggatgtccgggcgcacggcggcgtccgcatacccgcgggagccgtaataacggcgaatcatcgtcacgtcgtcggccaccttctgggcggaataggtatccccgttgtacatgctcaagccgggaatcagctcctgggccgtaaacaccttggtggggccgaaggcgacctgattgaccttgtagcgccgcccttcggtaagcgtgatcctcatcgtcagcttctgctcgttgcccttgccggcgtcaaagtattccaccttgtccagcttgacgcgcaggtagcccttgttgcggtaataagtcaccagttccgccagatcatcctccaattgctcgcggtcaatgcggccggacttggtaatccaggtcagccagcccttctccttggtcttcatcacctggcggaggtccttggcgctgatgtggtcgttgcctacaaaatcgatgttgatgatattggccttcttgccttcattgatgtcaaaaaccacgtccacaaagccggggcgctccgtcttctggtaaaaataggaaacgcgcacatccggataccgggcttcctgataataggtgcgcagcttggagatggcgctgctgagggccttgtcgctgagggcttcccctcccttcaagccgcattcctcggaaagatcccggttgtcgaacgcggtgttgccgcggaagcccacgccgcccagcaggttctgggccgccatttcaaacaccacggtcacgccgtcgccggaaggttccacagccaccgtcgtattgccgcctaccaggccgctttccagcagccgttccaagtccttgttcaccacttccggggaataattggtgcccggctgggtagccagcaggtttttcaggcggtcttcggacacggtcttgccggtgcttctataacgcacggagacgcttttcacgggacgcccctcatacgcctggtcaccgggcagaagccccgtttccggaccgagttcccgcaccacctgttccggggtcattacggaaccgtagccgcctctgttaagggaagtcttatcctgggccaaagcagccgaacatgctatcaggggaaaggaaacacacaaaaaaacgggacgaatcatgagagctgaacttaatgcttgggatataaaggacttttccgtccgcatagtcaagacgtgattccgcgtagaacgcagttgccctgcatttcttatgttgcgcgcgcatgtgcgcctgagaaaggcaattgtgtcattcccgtgcaatagcttgcactccagatacccgctcattacatttattgccgctcgtgttttgaccgctgccgccataccggagccgagacagaaccactttcaattaacactgaccgtattatttatggaaatcaacgttgatattcaaccggactgcacagccacgctgaaagcttccatccccgcagaaaccacggccgcgcgccgcgcctctattgtggattcctacgccggcaaagccaagctgcccggcttccgccccggcaaaacgcccaagtccatcattgaaaaacgtttcaagaaggaaattgaagaagaactgctggacactctttttgaaacggcctgctccgccgctctggaagaaaatcccaaattgaaagtgctcaacttcggcaagccggaacaatccctcgacgaccagggaaattacaccgccaccagcgcgatgaccgtggttcccgaattcgaactgccggaatacaagggcatcgaagtcaaggtcccctcctccgaagtgacggaagcggacgtggaggaagccctgaactccctggccgaacagattgcggaatttacccccgtggaccgcgccgcgaagaaggatgacgtggcgatcattgatttcaagaccaccctggacggcaagcccgtagcggaagccgcgggcaagcccgtaggcttcctggaaggccgcgacggccagtggatgaaggtggaggaagaccagttcctgcccggcttcgcctccgccctggaaggcttgaaggccggcgacagcaaggatatcaccgtcaccattccggataccttcccgattgcggaactgcgcggcaaggaactcgtgttccacaccaccgtgaaggaagtgcgtgaaaagcagctcccggccatggatgacgcctttgcggaaaaggtgcttcccggcaagaacctggaagaactgaaaaccgccctgaaggaaaacctggcccagcgcaagaccatgcagattgacgaagccaaggccgaccagatcacggaaaagctggcggacatgcttgacttcaacctgccggaagccgtcgtggaacgcgaagtgtacggcatcctccagcagaagatgcagcaggccatgtacagcgggaacgccccggcggacatggacaagtttgtggaggaagcccgcgaagaagccagaaaggaagccaagcgcaacctcaaggtcttcttcatgctccaggaagtggcccaggtggaaaaaatcgccgtcacggaaatggaactctacaatgaagtggcccgccaggcccgccagcagaaaaagaacctcaagtcctacatccgcgaacttcagcgcgaaggccgcgtgcatggcatcagaatgagcctgctgacagccaaggttctggacttcctgacaaaagaggccaaagtaacggtagacgagcaataaccctcctctgcacaagacaccttaccagggggagttggcgcgcacatgcccgactcccccgttttgcatcctgcagacgggtagcatacattaaataaaacaacatcccatcttcaacaaacatgtttcaagaccaatcttccaaatcaagccccatgaacgcctactacgtccccatggtggtggagcaagacggccgcggcgaacgagcctttgacatttactcccgcctcctgaaggaccgcgtcatcttcatcggttccgccattgacgacgatgtggcgaactccgtgattgcccagcttctgttcctccagatggccgacccgaaaaaagacatccacgtgtacatcaactcccccggcggctccgtcaccgcgggcctggcgatttacgacacgatgcagttcgtctcctgtgacgtgaacacgtactgcctgggcatcgccgcctccatggggtccgtccttctggcggcgggcacgcccggcaagcgcttctgcctgccgaactcccatgtgatgatccaccaggtttccggcggcgcccagggcaccgcctccgacgtggaacgcaccatcggcttcatgttcaacctcaagaagcgcctcaacggcattctggccaagcacaccggcaaaacggaaaagcagattgaaaaggacgccgaccgcgacaactacatgaccgctgaggaagccgcggcctacggcctggtggacaaggtgctgacgcatcattccgacggacgggacgacaagaaaaaggccaaggcctgacccctgcctcccccatttctctctccctgaaaaaccatgtccggttccaaccctcatattcctgcctgttcctgctgcggcaagcccgggaacaaggtggacaagctcatccagatagcagaagacttctatatctgcaacaattgcgttgaaatttgcgtcaacatgattgtgaaggataccggcctgccgctggcgacccgcttcatccgcggcattctgagcatggagccctccgcctatgccatgtgccaggcggaggcccgcaaggccgctgccgcggatatgctcaaggaaacgccgggagccccggcctcctacgaaggaccgctgcccacgccggaagaaatgtgcgccacgctcaaccagtacgtcattggccaggattacgccaaaaaagtgctctccgtagccgtgtacaaccactacatgcgtctgcgccagagcgccgtgatgctggaggacgaatccctggacgacgtggaaattgaaaaatccaacatcctgctggccggccctaccggctccggaaaaaccctgctggcgaaaacgctggcgaaaatgctcaacgtccccttctgcattgtggacgccaccacgctgacggaagccggctacgtgggggaagacgtggaaaacatcatcctgcgccttctccaggccgcgaactttgacgtagccaaggcggaacagggcatcatctatgtggatgaaatcgacaagatcggccgcaagacccagaacgtctccgtcacgcgggacgtctccggggaaggcgtgcagcaggccctgctgaaaatcattgaaggcaccatctgcaacgttccgcccaccgggggccgcaaacacccgcagcaggaatacatccgcgtcaacacggaaaaaatcctcttcatcgtgggcggagccttcgtcggactggaagacatcatccgcaaacgcctcggcgccacccagatggggttcggagccatcacggaacagcgcgaccgcaaggaatactcggaagaggaaatcctggcccaggcgatgccggaagacctcttctccttcggcatgattccggagctcgtaggacgcctgcccatcttctgcccgctctccaagctggatgaaggccagctcgtccgcctgctcacggaacctaaaaacgccctggtcaagcaatactccaaactgctcgccatgtacggcgccaggctggatgtgcagccggacgccctgaaagccatggccgcggaagccatggaacgcggcacgggagcccgcgccctgcgttccatctttgaaaccctcatgctggacgtcatgtacaaggtgcccagcatggaagacgcggactccgtcaccatcaccagggaaacggttaccgacaaaaaaccggcgcaaatccgccaggcctcctaactcccccgcttctccgccatgccggaatccctcaccgttctgggaatagaatcctcctgtgatgaaacggcggtcgccatcctgcgttccgccggggaggaaaaagcgccggaaatactctcctccatcatctcctcccagatcgccatccaccgccggcacggcggcgtggtgccggagctggcttcccgcaaccactcggcggaccttcccggagtcatccgggccgcgtgccgtgaagccggcgtgaccccggcggacatcgatgtcttcggcgccacgggcggccccggcctggtagccgccctgctggtgggcaacagcacggccaaggcgctggcgctggcgacgggaaagcccttcgtctccgtcaaccatctggaaggccatttgctctcccccttccttaaacgtcccggaggccccgttccccatctgggcatggtcgtctccggcggccataccctctttgtggatgtgcgcggcgtgggggactaccgcctcctgggccgttccctggacgacgccgcaggggaagcctttgacaaggtgggaaaaatgctcggcctcccctaccccggcggcccggaaatcgaccgcatggcggcgcacggcgacccgcaggccttctccttcccccgcgccctgatgaaggagcacacggccaatgtctccttctccggcctgaaaacggccgttctctacaccctccccaggctgacggcaagcggcgaccctcacgacctgccggaacagaccctgcgcgatctctgcgcctccttccagcgtgccgtgacggacgtactgattcacaaggcgctgcatgccctgcgcgtttccggccaccgcaccctttccgtttccggcggcgtctcctgcaacggggaactgcgctcccgcctgaaagccgcctgcgaccgtgaaaacgtggaactggtcctgccggactttgacctgacgacggacaatgccgccatgatcgcctatgtcacctgccttaaagcccgcaggggactgttccactctctggatgaagacgttgaccccaatctcaaattgacggaggatctgaacagatccaaatattcaacgcattcctgataaagatattacacatgaacaccccgtatttgcggcataatgataaaaaaatgttcatgttttcattgacatcccgtatttaaaaacgtaacatagcgtccgcttttcgtcaggcaacacgggaggatgctatttatccgctagaaccgcaggtttgggcggatttacaactctctaagagcagcgaaaggcggaagaagtctatgcttctgtagctcaggggtagagcgcatccttggtaaggatgaggtcgcgggttcaattcccgccagaagctccatcttcaagctagacccatagcagcccaaacctaaacaaaacattatggctaaagagcaattccagcgcaacaagccccacgtgaacgtgggcaccatcggtcacgttgaccacggcaaaacctcccttaccgccgccattacttcagtgctcgctaagaagggtttcgccgaagcacgcggctatgaccagatcgacgccgctcccgaagaacgcgaacgcggcattaccatctccacggcccacgttgaatacgaaacggaaaaccgtcactatgcccacgttgactgccccggacacgccgactatgtgaagaacatgatcaccggcgctgcccagatggacggtgccatcctcgtggttgccgcttccgacggcccgatgccgcagacccgcgaacacatcctccttgcccgccaggtgggcgtccccgccatcgtcgtttacatgaacaagtgcgacctggttgacgaccccgacctgatcgaactcgtggaaatggaaatccgcgaacttctcaacgaatacgaattcccgggcgacgacacccccatcatcaagggttccgccgttaaggctctggaaggcgacgccgccgctgaagactccatcatggaactcatggctgccgttgactcctacatcccgcagcccgaacgccccgtggaccagcccttcctcatgcccgtggaagacgtgttctccatctccggccgcggcaccgtggctaccggccgtatcgaacgcggcatcgtcaagaagatggaagaagtcgaaatcatcggcatcaaggacacccagaagaccgccgttacggacatcgaaatgttccgcaagctgcttgacgaaggccaggccggtgacaacgttggcctgctcctccgcggcctgaagaaggaagacatcgaacgcggccaggtgatcatcaagcccggcaccgtgaagccccacaagaacttcaaggctgaagtttacgtcctgaccaaggaagaaggcggccgtcacaccccgttcttcaacaactaccgcccgcagttctacttccgcacgacggacgtgaccggctgctgcacccttcccgaaggcgtggaaatggtgatgcccggcgacaacgtcaacctggaagtccagctcatcactccgatcgccatggaaaaagccatgcgattcgctatccgcgaaggcggccgcaccgtgggtgccggtcgtatcagcgaaatccttgactaagttcccctggaacttgtagaggaatctacataggtttaatgagggggcctccccgcaggccccctcatttcccacgaaagaagagacaccaacaggtcagtagttcaattggtagagcgttggtctccaaaaccaaaagttgggggttcgagtccctcctgacctgccacttctttccaaatacatcaccccaccttgaagcatgtttcgcaagatttctcaattcatcgccgaagttaagggcgaacttaagaagaccacctggccctgggaaagcgatcccaaggtgaaaggttttaaaaaattccgcgaactctggggttccactctcgtcgtactgattgccatggtcttccttggcgcgtttgttgcatcgttcgacatcttccttcacagcgtggtcaactacctcatccagttggcaatctagttttactcccactttctttctccgatcatgcccagtaccccagagcctcacgaacaatggtatgttcttcacgtcctctccggacaggaaaacagcgttcgtgaccgcattatccgcaaggcgaaggacgccgaactttccgacttcatctaccgggtggaagtccccacggaactcatctccgaagtgcgcaacggcaaaaagacggaacgccacagcaaactcttccccgggtacgtctatgccaacatgtacctgctggaagcggacggcaccctgaacaaggacctctggtacttcatccagcagattgacggcgtcattagcatcgccggttcccgcaacgctcccctgcccatgcgcaagcgcgaggtggaggatcttctgcccctgctggacgcggaagccgtcgccgcccgtcccaaggtggaattcgccgtcggcgatcccgtgcgcgtctgcgaaggcccgttccagagccaggaaggcaccatcgaagaaatcgaccccgaaaaaggcaaactgcgcgtcagcgtctccatctttggccgcgccactccggtggacctggaatactggcaggtggaaaaagcctgagccccattcgccggcaggcagcaagcttctcccgttcattttctccgctaacaaagcaaaaccatggcaaaagaaataaccaaaatcatcaagctccagatcaatgccggagccgctaacccctccccgcccgtgggtccggcacttggtcaggccggtgtaaacatcatggcattctgcaaggagttcaacgccgccacgcaaaagcaggccggcgacctcctgccgaccgtcatcaccgtttacaaggacaaatcattctctttcatcaccaagcagcccccgggcagcctgcttctcaagaaggccgccggcatcgcctccggctccggcgaaccgaacaaaaagaaggtcgccactctttccaaggccaagctgatggaagtcgtcaacaccaaactcccggacctcaacacgaaagaccccgaacgcgccgcccgcatccttgccggccaggcccgccagatgggcattgaagttgaaggtatgtaacactcaccgcaggaggattaaccaatccgaacgcactgccaaatacacacatgtctaccaaacgcagcaagcgatatcaagaagcagccaagcttgttacccctaacaagaactacagcatcacggaagccgtggaaaccatgaaatctttcccggccccgaaatttgacccgactgtcaccgtttccttccacctgaccgtggacccccgcaaatccgaccagatggtccgcggcagcgtctccctgcccaacggcacgggtaagaacgtccgcgtcctcgtcttcgcccagggtgatgccgccaaggccgcccaggaagccggagccgaattcgtgggttttgaagacctcatcaagaaggtccaggaaggattcgtcgactttgacacggccattgccacccccgacgccatgacggaggttcgcaaggttgcccgtgtgctgggtccgcgcggcctgatgcccaacccgaaaaccggcaccgttacggatgatacggccaaggccgtgaaggaagtgaaggccggccgcgttgactacaaggttgacaagaacgccaacatctccgccgctgtaggcaagctgtccttctccaacgaaggcatcactgaaaacatcgttgctctgattgattccgtcgtcaaggcccgcccggcttccgccaagggcgcctacatcgaatccgtcaccgtttcatgcgccatgtgccccggtctgccggttgacaccgcttccatcgccaaactgtaacccgaaccgatttagcacaccatgaatcctgacaagcgtatcatcattgacgacctgaccgcccgcgtcaacgcctccccgttcctgatcgtcgtggactacacctcgatcaccgtgcctgagttcaccaacctgcgttccgccctggccgcctgcggcgcccagtgccacgtagccaagaacaacttcatgcgtacggccctgacggatgcaggccttcccgacatcggggaacacctcgtcggccagaccgccttcgtgaccggcgcgtccgacgtggccgccgccgccaaggccatcaatacctttgcgaaggcctccaagaaggccgaatacaaggtggcgatcctggacggagccatcctctccgcggacgacatccgcgccatcggtgaactgcctccccgcgaccagctgcttgccaagctccttggcaccatcaacgcggccggctccgctcttgcccgagttcttcaggcatatgtggacaaagaaaacggcggcagcgaagaacccgccgcctaatactaaccccttgaccggacggcccggttgcactctagccaaatgtgtgaaaaccgggcccgactctcctacaggttccttgtcggaactccagccggagaactgaaatgccaagttggctcttggcgcgactcgaaaccaaactagaaaacaatacaatggctgatattaacaaaatcgctgaagaactcggtaccctcaccatcctggaagctgccgacctcgtcaagcttctagaagaaaagtggggcgtttccgccgctgctcccgtagccgccgctgccgctgccgctcctgccgaagctgaagaagaaaagaccgaattcaacgtcgttctgacggaagccggcgccaacaagatcgccgtgattaaggccgtccgcgaagtgaagaccggtctcggcttggtggacgccaagaaactggttgaaggcacccccgccgtcatcctggaagccgtctccaaggacgaagctaacgccgccaaagccaagctggaagaagctggcgccaaggtggacgtcaagtaagctttttacttcccgcgcaacaggagaagacccgtttttctcctgttgcgcttcctcgtcttcacatcccgcgtgaccgactagaggctttttacccgtcaaaacgcttccagtcggttccgtctcccaaggaaggaaccaatcaacccagcatccgggttttcaggatgcaaacccataacatctccgccacagcagcccatgtcaaagcgactctacttcgggaatatcaaggaagtcatcgaacctccgaaccttattgagattcaacttcaatcatacttcgattttctacaacaggacaccccggccgcggccaggaaaaacatcgggttacacggcgttctgaaggaaatctttcctatcaagagctatgacgaaaacattgagctcgacttcgtctcctacgacatcgaacagccgaagatgagcgattacgaggctatccgcgccggggaaacctacagcgccgccctccaggtcaccttcaagctcaagtccgacaacgaatccaaggaagaaacggtctacatgggtgaactccccatgatgaccaaccgcggcacctttgtaatcaacggcgccgaacgcgtcatcgtgtcccagctccaccgttctccgggcatctgctttgaaagcgcccagcacctgaacggcaaactgctccactccttccgcatcattccggaccgcggctcctggctggaagtccagtttgacaccaacgacctgctctacgtctaccttgaccgccgccgccgccgccgcaagttccttgcgacgacgttcatgcgttatctgggcttcaagacggaccgcgacatcgtcagccagttctacgacatccgcacgcttcccctgagcgaagacatgacggaggaagacctgcacaacctcgtggccgtggacacgatcaaggacaaggatctcgttcttgccaaggctttcgaacagctcaacatgggcgtggttcgccagctcctccagttcggcatcaaggaaatcgacgtcatcgaccagagcgaggacgacgtgctgatcaagaccctgaagaaggatcccgcccatgacgaggaatccgccctcaaggaaatctacaagcgcctgcgtcccggcgatcccgccacggccgcccaggcccgcacgctgctcaagcggctctttgacgatcccaagaaatacgacctcacccgcgtgggccgctacaagatcaaccagaagctcggtctggacaccagcctggaccagcgcctgatgacggcggaagacttcctggccgccctcaagtacctcctgcgcctcaagaagggcgaaggcatggtggacgacatcgaccacctgggcagccgccgcgtgcgcgccgtgggcgaactcatggccaaccagtgccgcgtgggcctcgcccgcacggaacgcctggtgaaggaacgcatgaccctcattgaccagaacattgaaggcgtgacgcccagcaagctcatcaacccgaaggccctcagcgccgtcgtgcgcgacttcttcggccgttcccagctctcccagttcatggaccagatcaacccccttgcggaactgacgcacaagcgccgcctctccgccctggggcccggcggcctgaaccgcgaccgcgccggattcgaagtgcgagacgtgcatccctcccactacggccgtatctgcccgattgaaacgccggaaggccccaacatcggtctgatcaactccatgtgcacctacgcccgcatcaatgaattcggattcattgaaacgccctaccgcaaggtggaaaatggccgggtcaccaacaccatcgaatacgtcaccgccgatcaggaagaaggctatctcatcgcccaggccaataacccgctggacgaacagggcaacttcacgacctcccgcgtaaccgcccgtgaaaaaggcgaattcatcgaagtggatccggcagacgtgcattacatggacgtttctcccaagcagctcgtttccatcgccgccggtcttatccccttcctggaacatgacgatgccaaccgcgccctgatgggctccaacatgcagcgccagggcgtgcctctgatggtagcggaatctccatacgtgggaaccggcatcgaaggaaagtgcgccagggactcccgttccgtcgttctggcggaagcggacggcatcgtggcctccgccacggctgaagtcatcatcaccacgaaagacggggaactgcccgtgcgtccggaagtattcctgtccgatcccgacagtgtgcgcacggaccgcgacaatggcgtttacgtctatcccctgcgcaagttcatgcgttccaatgccggaacctgcatcaaccagcgtccgatcgtgcgccgcggcgacaaaatcaaaaccggcgacgtgctggcggacggcccgaacacggaccagggcgaactggctctcggccgcaatgttctggtggcctatatgccgtggaacggttacaacttcgaagacgctattgttatctccgaaaaaaccgtgaaggaagacaccttcacttccattcatatctccgagtttgaagttcaggcccgtgacaccaagctgggtccggaagaaatcacccgtgatatcccgaacgccggtgatgaagccctgaaaaacctggatcatgacggcgtcatccgcatcggcgcggaagtgaagcccggcgacatcctcgtcggcaaaatcacccccaaatcggaaacggaactggctccggaagaacgtctcctccgcgccattttcggtgaaaaggccgcagaagtgaaagatacctcactccgtgtcccctccggctgcaccggcatcgtgatggatgtgcgcatttcttccacaggctccggccaccaccgcggcgacctcgtcgtagacagcgcggaaaagaaaaagcagttcaagaaaatcaacgacgaacataaaaagaagaaggagcagctcattgaccagttgaccaagaagctctccgatattcttctgggtgaaaaaatcccgctggacgtcgtcaatgaacagaccggtgaaatcatcatcccggccaacaggaaaatcaccaagaccctgttgcgtaaactggccctggttcacgaccacatcgaaatcgaacccagcccgattcgcaacaagattctggaaatcatcacttcgtttgaaggccgctttacggaactggatgacgaacgggaacacaggctggatcagatggaatccggggacgaatccgaacccggcggactgaaggaagttaaagtatatatcgccgccaagcgcaagctcggcgtgggtgacaagatggccggtcgccacggcaacaaaggcgtcgttgccaaaatcgtcccggaacaggatatgcccttcctcgcggacggtactccggtggatatcgttctgaaccccttgggcgtgccttcccgaatgaatgtggggcaggtgcttgaagcccacctcggcatcgctgccagggcccttggcttcaaggtggctaccccggtgttcgacgggatcagtgaagaaaccatctggaattacatgtccgaagccaagaaggtggacggtttcacctggatcggtgacggcaaggacggcaccgtgggagggaagagtaccctttatgacggcctgaccggcgaacctttccataacccggtggtggtaggccagacctacatgctcaaactgaaccacctggtggcggacaagattcacgcccgcgccgtgggtccgtacagcctggtcacgcagcagcctctgggcggcaaggcccaatacggcggtcagcgtttcggggaaatggaagtgtgggcgctggaagcctatggcgccgcctataccctccaggaacttctcaccgtcaagtccgacgacgttcagggccgtacccgcatttacgaatccatcgtgaagggggataataccctggaagccggaactccggaatctttcaacgttctgatgaaggaaatgcagtccctggggctgaacgtacgccccggcagcaaggatgaacaaccctccctgcaactcggcggcacggatctcactcccgtggacggcatgacggaaggctttgacagcgacgacatggccggcctggcggacgtcgacttctccgacctcaaattctaatatccaccgcattccgcccccgtgccgcaaaacgcgggggcgggcaccaaacatccttctaaactttcaatatatgtctgacacccccaccatcagggaaatgcacggcctgagcgacaagccccggacctttgaccaggttgccatcaccgtggcggatccggataccatccgcagctggtcattcggtgaagtcgtcaacccggaaaccatcaactaccgcacgttcaagccggaaaaaggcggcctgttctgcgaacgcatcttcgggcccacccgagacatggaatgcgcctgcggcaagtacaagcgcatcaagcataagggcatcacctgcgaccgctgcggcgtggaagtaaccaacgcgcgcgtgcgccgcgaacgaatgggccatattgaactggccgttccggtttcccatatctggttttacaaatgcatgcccagccgcattggccttatgctggacatgacagcccgccatttggaacgcgtgatttactatgaagactacatcgtggtagatcccggcagtacccctctggaaaagggggccatcctgacggaagaagaattccgcaatgcggaagacgaatacggctatgacagctttgaagccggcatgggcgcggaagccatccagaaaatgctggcggccattgatctgcccaccctcgtcgcggatcttcaggaacagctggacaataccaactccaaacagaacaagcgcaagattgccaagcgtctgaaactggcccaggggttccttcagtccaacacgcgcccggaatggatgattttgaacgttctgcccgtcattcctccggacctgcgcccgctggttcccctggaaggcggccgtttcgcaacgtctgacctgaatgacctgtaccgccgcgtcatcaaccgcaacaaccgcctgaaaaccctcctgagcctcaaaactccggaagtcatcatccgtaatgaaaaacgcatgcttcaggaagccgtggatgccctgtttgacaacggccgccacggtcgtgccgtcaccggcgccggcaaccgccccctcaaatccctctccgacatgctgaagggcaagggaggccgtttccgccagaacctgctcggcaagcgcgtggactactccggccgctccgttatcgttatcggtccggaattgaaactcaaccagtgcggtcttcccaagaagatggcgctcattctgtttgagcccttcatcatccaccgtctgaaagagctgggctacgtgcacacggtgcgctccgccaagaagctcattgaccgcaagacgccggaggtgtgggatatcctggaagaagtgaccaagggccacccggtcatgctcaaccgcgcgcccaccctgcaccgcctctccatccaggcttttgaaccggttctgattgaaggctccgccatccgtctgcacccgctcgtctgtaatgcgtacaacgcggacttcgacggcgaccagatggctgtgcacgtgcctctgtccgtggaagcgcagatggaagcccgccagctcatgctggcgcccaataatattttctcgcctgcctccggcaagcccattgccacacccacgcaggacatcattctgggcgcgtacttcctgacacacacccgtgctgcggaagtacagaacaatcaggataatcatcaccatcttcccctcttcgaatccatcgacgaggtggaatacgccattgccgcccgcaagatcggctaccatgactggatccgcctgcacaacccggactacggcaagaagccttccgaagtggtgtatggggatgtcaccaagaaggttatcatcactactgccggacgcgtgcgtttcaatgaaatctggccccgggaactcggttacattaaccgtaacgtaggcaagaaacagatgggcgacattatctggcgctgctaccagaccgtcggcaaggaacgtaccgtgcagaccctggacgccctgaaaaacctgggcttcaaggaagcaacccgttccggctgctccatcggcatcgtggacatggtggttccctcccagaaaaagacggaaattgaaaaagcctatgcagaactggacaaggtgacccgccagtataagaacggtatcatcacggatggggaacgctatcagaaggtggtggacatctggactcagactacggatgtcatccaggcggctctgtaccgcaagctggaacacaacgaaggctccaagatggccagcccgctcttcatgatggtggactccggcgcccgaggcaacaaggcgcagatcaagcagctctccggcatgcgcggtttgatggcgaaacccagcggcgaaattatcgaacgccccatcacggccaacttccgtgaaggcctttccgtgctggaatacttcatctccacccacggcgctcgcaagggtctggcggataccgccctgaaaacggcggactccggctacatgacccgcaaactcgtggacgtggcccaggatgtcatcgtccatgcggaagactgcggcaccagcaacggcatcaccgttcacgccatttatgacggcgacgaagaagtggcgtcccttgcctcccgtatctacggccggacttcctgcgaacgcatcgttgaccccgtcagcggcgaggttatcgtggacatcaacgacctcattaacgaaaagcaggcggaacaactggaaaaaatcggcattgaacggctgaaaatccgttccgtgctcacctgcgaactcaagaaaggctgctgcgccaagtgctacggcctgaacctggccaccggacaggaagtgaagatcggggaagcggtcggcattattgccgcccagtccatcggcgaacccggcacgcagctcaccatgcgtacgttccacgtgggcggaacggccaccacggcgttcaagcagcccattgtgaaagccaagaacgacggccgcgtcatctacacggaagatctccgcacggtggaaaacgcagacggcaacttcgtcgtcctgaataaaaactgctccgtccgcatcgaaaacgaacagggccgcgaactggaatcctaccagcccgtcatcggcaccatcctgtacgtgcccaacggcggcgctatcaagaaggatgaaaccctcgccacctgggatccgtacaacgtgcccgtgattgcagaaaagggcggcatcgtcgaattcaaggatatgatcgtcggcatcaccgtttccaaggaaacggaccgggaaaccggcgcctcctctcttgtcgtgatggaacacaagcaggaacttcacccgcaggtggtcatccgcgatgccaagacccgtgaagttctggctcatcatgccattcccgcaggcgccaacctcaccgtgaaggacggggaaaccatctccgccggcacgatggtggccaagacgccccgcaaggtagccaagacgaaggacatcaccggcggtctgccccgcgtggcggaattgttcgaagcccgcaagcccaaggacgcctgcaccattgcacgcgtggagggcattgtgcgcctcagcagcaagaatacctcccgcggcaagaaggtcattaccattgaaacacccacgggcgaactggtggatcatctggttccgatgaacaagcacgttatcgttcatgaagacgaccatgtgcatctgggcgaccagcttacggaaggccccgtctctccggaagaaattctggatgtctgcggcaaggaacgccttcaggaacacctcgtcaacgaagttcaggaagtgtaccgcctccagggtgtggaaatcaacgacaagcatgtggaaatcatcgtgcgccagatgcttcgcaaggtagtcatcacggaacccggcaataccgaattcctgtggggagaccaggtggacaagactacgttcgaccgcatcaatgaacaaaccgtagcccagggaggccaaccggccgcagccaagcccgttctgctcggcatcacgaaggcctccctggaaacggaatccttcatttccgcggcatccttccaggataccacgcgcgttctgacggaagcatccaccctcggcaagaccgatacgctggaaggcttcaaggaaaacgtcatcatgggccacctcattcccgccggcaccggattctcccgttacagcaagattgaagtggaacccgcagagggcgcagaagaaatcgcgtcggccagcgaagaagaggaagcggcggaacttgccgaaaacatgttgaacgataccatcaacttcgacaacgaacgctaacctgttctctccacccacacttcaagggccgctccccgtttccggggggcggtcttttttatgtcttctccgcgttatttcacgaaaagaggaaaagcggattgaaaattcggcgatgattccaatattggcccatgcaatataaaatttgatattttatattcaaaatgaaagtcttatagtatgcctcccttgcttcaaggggggaggtaaatgaaaaggtgaaaatcccattttagaaatttaaaaaatcataatgcacttacagtaaaagtattagaatccgggaactggtattttcaacttgacatcgaattttcaatccgttatatacataaaaaattaacatctaatatttttgcaatgcgtctccatctgcctattaccctgctggcggctgttctggcttgttacaccagtgtttccctggccgtcccaacatctgaatcccccgcatggggagcgaactccacctttaataacaatgagcccgccaatgagtattcagttactgggagccaatccgtcaaccttgatgtaaattcaggaaacaacaattattccacaggactttatatcggagcaggctcctcgtttaccattaatcagaatgtgaacggcgcctgtaccatcaatttgaacggggcatttgccggagaaggaaatttaatgctggtagcggctaacggcaatgccggctatgcctccaagtttgtgcttggttcccaggaaagcagtttttccgggaacattatcctttcccagaaggggacgcagcccggcggcgccattctccagattacgggaacggctctcgccaacgcaacggtagatttgtcaggctcaatcaatcaaagttccagcgccctgacgttgcaaatttccaatgccgcctctctggccggtttaaatgatgccgacggcttcaacggaacacataaggggcgcgtccagtcggctaattcctccagagcgaatcttaccctgacgggcaacggaaattacgcgtatgggggaaatatcggggcaaccacgcagcattccggagaaaacggcaacactactcccacgggaggaataaatctgattatggccggaacaggcacgcaaaacctgacgggaaccgtcatcaacgcgaatattacggcccaaggtggcaccttgaaaatcaacaattcttccctggcctattccggaataatcaccatggcgggaggaacgctggatttcacctccgccactctgggggcaaattccgttctgaacatgaacggcaccggcatattgaaaaacgcagccattgacggagccaagctaacctatacggaatccggttcctcctttaccaaggaaaatgtaactttcacttcaggcaccattgacatcggcggcgcgcttgacagcctggtagagggagagcagggatacacgtttgatttagggaacaaccttgatacgaattttaccgtattgggcttagagagagagcaatatagtatagaaggccgcgtgctgatgataaaagacgtggcgatatcccgtgtgacgtgggtatctgcgggagcgggaggggcattggaagaaacggtcaagaatgcctttacgctggctcttggggagggaagtgcggccaacgtcagcctgggctatctgaacggtacgctgacgacgagcggggacaaagtctatcaaatcaccaacaccggcggaaccaaaatcaacctgaacggggtatacaacagagggaagacgctgccgtccggcaacctcaactaccggggggacatctggatggacatcagcggaggagcattcggcatcatctccggaggtgtcaccaatgaatggagcaccaacctccagaccagcacgctgactggggacacccatgtgcagctttccggaaaagccacggcggaatacgtcatcggcgggaacaacaagggagcgtctacaacattaacgggaaacaccaacgttaccgtcaaggataacgccatcgtggcgggagccatcatcggcgggagcacctccgcccacaacgccgtcaccaccatcacgggcaacacgagcgtgctggtaaccaatgtccaatattccaacacggcccagaacctggatgggggactctccaactcatacatcatcggaggaagctcctggtcaagcaataccacttccggaacaacgattcaaggcagcacgtcggctacaatcaacctgaacggaatcacgctttccggaacagaggaacacaacagcttcgtcaaaacaatcattggcggcagttatggcaatgtaaacaacgccggaacggtcaacaacatcaacggagacacctccgtttccatcatcggcagggaaggaatcaccttcacgggggacatcattgggggttcctttgaaaattcaggccaggcccaatacacgattggaggaaaatcctccatctccattagcggaggctccaccttcaccggcaacatctacggtggctcctactccaaagtgccaggaaacacaggcagcaccatgaccactgcaggcaatatcacggtagaactcggaacaggcacctaccggggaaacatttatggagcaggaaataaaggcacggcaggaggcgacgtcctcgtctccctgacgggaggaagcgtcttcggggcggaagggaaacaaagcggcatcaccatcggcggaagcgccggagcggcggtagaaggaaacaggacgctggagctcaagggaacctttggagacggagacttccaaaacgtcaccttcacccggtttgatgaaatcaatatcgcgcaggaaggatcctcggccaccatctgggcgctgaccgacagcccgtccctgaccaaaacgggagcgggaaccctgacactcggggcggacgcggcaggagcggaaaccatccttgacggaaccacggaaggaatcaccatcacggaaggcagcctgaacctctccggagccggcggcagccatatgaaaggaacgtggaacatcgcctccggctcccgcctcaccggagtcagcggaaccgtcaccgtgggtggggaaaacggtctggacagtctgtccattgccctgggaacggaaaacatcggccaggacacgcaggcgtctgtcgccgtcatcagcaacggcagcggaacgggaagcgacccgaacctgtccatcgaggggaaagggctgacgctggacctgagcaacgacgccgtcgtcaacctcctgttggatcacaaaaccgacgactcctccagctacctgaccctgaccagcggaacgctgaccgtcggcaacctgggcgacatcgccttcactaccgaccttctgtccaactacggcatccggatcaccggaacggacggaggcagcctggtgctcagcggagcggccaccggcctctaccgcgtgcaggaggaaggaggaaacgcccatgaagtcaactcctatcaaacgctctccggctacgccggcgtcgtcatcggcggcggccagaccctgacggtcaacctggccggagccccgggcgaagccgacggacagggagctaaaatcaacaacctgatgggagccacgggcagcagcctggccgtcaacaacaccggagacggcacggccgtcgtcatcctcaacaacaaacaaatgacgacgggagaagacgacatcgacccggccggccaggacaccgtcatgggcggcagcatcacgggcggcagcaacgtcaccttcatcaaggaaggaaccgggacgctgacggtcggaggaacgatggacgtggaaaccctcgccctgcgagaaggaaacatcatcctcaacggcacggaaaactccctggacaccctcacgctggaaggaggaggcctgaccatcagcggcaacgccgaaatcgaaaccatcaccggcacggaagccggaggaaccctggccattcagggaactcttgacctgaccggaacaagcagcatcaacaacggagccatcaccggaaccggctccctccgcatccgggaaggagcggaactggccctgggcggagaagcccggctggacggaacctcagtcaccgccgacggcacgctgaccctcaccggaacggaatccggcgccatcagcggcctctccggaagcggcgccctgtccatgaacggaggcagcctctccatctcctcggcgacaacctcctccggaaccttctccggcacgctggcaggcagcggcaccctggacatctccgggcaagccacccaatacctgcaaaccggcaataaggactacgacctcgccgtccgtgacggaggcgtcctggtcctgaaaggcaccgcggacgcccccacgctgaactacaacagcatcaccgccggaaacaacggcaccctgcgtattgaagccaccggggacgcccagggcagcgccaacaccacgctcaacgtgaaaaacatcaccttccagaacggctccacgacggaactgatctacaacttcaaccaggacgccccctttggcgcccccatgctgacggcgggcaccatcaccgtgcaggacggagccggcttcctcctctccaacatgaaaggaaacgccgccatgaacgcggggagcgacctccatgacgtcgtcctgatgagcgctaccggcagcatcagcggcctggaagacgggcagagcctcgccgcccggatatccggcctcttcgccgtctactaccaggacgccacactgagccgcgacggaaacgacatcctgctcaatgccacactccggcaggaaaacctcttcgcctccgcggccgacacgtggaactccgccgccggagccggcctgctctgggaagcccgcaaaaacctggaccccgactcccagctggcccaattcatgaacggcgtcagcaccatgatcaatgacggcaacctctccggagcctcccgcgccatggcggcggcggctgggagcacggtcaacgcgcttgggacggcacagagggacgccctgcgcgaccagatgggctggatcaggaaccggaccaccctcatgggcgtcaacccggcctacgtcaacgacgacctcccccgcttccacatgtggatggaaggcacgggctcctacgccaaactcgacacccgcggggatgaaagcggctaccagctcaccacctggggaggcacggtaggcgtggacgcggacctcagcgaccgcctcacggtgggagcggccttcacggccggctacggcgacctgacggccggcgcggcggacagcgccgacgggcacctggacagctactacgccagcctcttcggccgctaccaggacaggcgctgggcgcacacgctcatcctgacgggagggtggaacgacgcgaaactcaaccgtacggtcaactatggggaaggaagctacgggacgcagggaagcaccagcgggtggggctttggagcgatgtatgaactcacctacgacgtatacctcaacgaaaaccgcagcagcgtgctgcagccgctgttcaacgcctcggtggtgacgacgcggatggacggctatgaggaaacgggagcgggcaacgcgggcctgaacgtcggcagacaggactggacgacggggacgctggcgctgggcggccggtggatgggcctggtaggcagcaacatcttcggacgagaagcgctggcggaaatccgggtcaacgcggcgcaggacctgggagaccggagaggggaaacgaacgtctccctgctgggcaaccccggcttcgcgcaaagcgtgaggggggcgaaagtgggaacgacggcgctgcagctgggagcggggttaagcgtgccggtgggaacgaagggaaccatctacgtgaacgggaacgcggacatccgtgacgggtccagctcggtcaacggaagcgtcggctaccgctacgacttctaaaagaaggaaaacccaaggagagggcacccctcctacccccgaaaagccttcctcctggccctccagagccgttccggaataattccggaacggctctgagtttttgtttatcggaagattattcctttggcctgtttccaaaaaggatgattaattcaaatgacgttttacaagaacaaacggccaagatatcaacatttctgttgcggaaaccattgtatccggcagatgatcaattaggaaacaatttctcattcatttccagaggaaacctgctctgtaaaaaaattccagaaacaaagataacatccggatgaagaacaaaaacatcccggcctctctatttggaagaataaacctgaagcatggcgaaaaataattttccgggcagtttttctttccatagccgggaatactcgattcccggtacattgcattctgttatccccctccagtaaaaataaaaaagacggcctccatgcggagaccgtcctatgattaatttgtctgccggcaggatgccttaagaccggcgacggcgcatcatcagtgcgaccagtcccagcagtcccagggaagccgtggcaggttccggcactgaagccaattctcccgtcatggaagccgtgaatgtagaatcattaccccttccctgatttgactcaacgaatacataaacgttttcagaagtcagtttgtttccggaaagatctgccgtcacagtaatcgtgccggacgtcgcctgcgactctaccgcctgccagccattttccgtctggtaggccagataaacccgataagtgccgccggtggaggtagccaaatccactgtgaatgtcagagaagaaaaagcatcagcagaataccccgcagcatccagggaaactttgaggcctacgccggaaccgccatatccctgcctattggtataggtcaccgttacagaaccgtcttcgttcccaacagcgcttttaaaataacttgaggtttcagaagatgtattggctttagatccgcaccatccggaagaattcgccaaccactcattcaagtgattcgccatggcggaaggatcgccacggtaggcttggaaggaagaattaacatcgcttcctgaatcataccctgacagatcaatctggacggttgcggccgttgcggaaagagcggcagcccccagcaatacaattgtggttcccagtatttttttcatcgtttactaatgttagtaactataaaacggagatagcggattttgaatccgaatttatcgataaaatatttattgttaaaaaattacaataaataatatatcaaaaattatagatagaatatcggtaagaacaaaatattgatttctataattttcttaccaccaattttttttattgataccggattcaaaatcctatttgttgaagaatcaacgtctcccatccgatccgatttttcaagacagacggggtcattaacaaattcaaaacagttgtgctgacgtttcccctgtaaacaaatcgaagtccgttaaaaaagaatccgcggattccactggcaccaacaaacccgttaacattgcaaataccggtatcaagaagaatgacgccgctatgaacggcgcattccttccgcaacctcagggaatgaatgccgctgccggtgcgcaggatgctctgctctttcggccatcctggccgtgaagccgaaacggcaggcatcattcattgtccatgaaataggcctgcaaaatacaaatgatatgcaggacaataggaacgagtgcaaagatgaaccaatacaggaggccgtaagccgcacctaccaccaggaaccagagaatggcctggacaaagtggcccttgtacaactggccgaggccgggaataaataggcttaaaatggctgctaaaaaagatttcatatgctggctgggtaagaaatggccgcacgggaaaaggttcgcgtgcctgtaccagttgagagccttccttcttccctcacgttcaatctcccggcgcagcccctgtcatgaatgacggttttcccggagcgaatgaagccgacgcggcagggaacgggaggcagtcatgttcaagtcttgaccgccgcatgggctatgttaccctccccgcgcacagggcactcatgttagaagggtagagaccaccatgtccattgaactgactcgcaatttctccattatcgctcacatcgaccacggaaagaccaccctttccgaccggctgctggaaaagacgaataccatttccgaacgggagaagcaggatcagcttctggacgccatggatctggagcgggaaaagggcatcaccatcaagtcccaccccgttaccattttctacaaggccggggacggaaagacttacaagctcaatcttctggatacgccgggccatgtggatttctcctatgaagtgtcccgttccctggcggcatgcgagggagcccttcttattgtggacgcggcccagggagtggaagcccagacacttgccaacatgcacctggccatggatctgaacctggccattatccccgtcatcaataagattgaccttcccagcgccaacctgcccaaagtataccgccagctggaggacatcgtctgcatcccccatgaggaagccatccatgcctccgccaagatgggcatcggcattgatgatattctggaagccgttgttcagcgcatccctccgcctgaaacggaacaggacggccttctgcgcgccctggtgttcgattccgtttacgacgcctaccgcggcgtagtctcctatgtgcgcgtcatttccggcagcgtgcaccgcggcatgaaagtcaaacttttcgcaacggacgaagtgtatgaagtgaaggaagtgggtatcttcacccccaaaatgacccgaacggattccctggaagccggcgacgtaggctacatcatcgccaacatgaaatccgcggcggatgtcaaaatcggggacacgtatacggattacatgcgcccctgcccatcccccctgcccggtttcaaggaaatccgccccatggtcttttccggcatttatccggtggattcctccgattttgaagccctgaaagcggccatggcgaagcttcagattaatgacgccgctttctccttccaggcggaatcttccgtagctctgggcttcgggttccgttgcggcttcctcggcctgctccatatggaaatcatccaggagcgtctgcgccgggaattcaacatggatatcatctccacctacccctccgtgatttatgaggtcaccaagaccaatggagaggaaatcaatgtggacaatcccagcctgctcccggaaccgcaggaaattcaggaaatccgggaacctatcgtcaaggtgttcattatgcttcctggggaatacatcggggatatcatgcagcttgtcctggaaaaacgcggcagcgtggacaatacggagaccattgacgatatgcgcgtaatgctcacctgcaccgttcctctggcggaaattctggtggatttcaacgacaagctcaaatccatgacgcgaggctacggctccatggattatgaatacgccggctatcaggccgccaagctcattaaaatggacatgctcatcgccggggaaccggtggatgccttctccatgatcgttcaccaggacaaggcagcctcccgcggcagggaactggcggaacgcctgaaaaacgtcattccccgccagctcttcaccgtcgccatccaggcctgcattggcggaaagattattgcccgggaaagcatctcccccatgcgcaaggacgtgacggccaaatgctacggcggggacgtcacccgcaagcgcaaacttctggaaaagcagaaggagggcaaaaagcgcatgaaggccatcggaaaaatcaacattccgcaggaagcgttcatcaaggtgctgaaaacgggggattaacccattttcttccctcaaggcatccaaacggggtcttccgttcccttcccggatttatacatttttccgtttgaatatgggccatgaaacacctcctgcactacttccccaaccatccccgggaggaggaatgctacatcaggctggccggctaccgggaagaggaggaaatcgacgagctgatctaccggaccgtgggccgcgttccggggtccgattcctgttcaggggaaaccggggcaaacggtacgaaaagaagctgcgctccggcagggtgagccacatcaacgaccgctacatgcatcccctggatatcgccatacgggaccggaagcagaaggaacaggaagccaggaaatactgaaaccgccgcggacgttgaacaattcccggttgcgcatttttccctgttatgctatcaggtcagtcatgagtctgcccaggctgtccatgctcctgtttgcgtccgcggctctctgttcctgcgtgggaacctctccggaacaggaagaaccgaaggtaaaaaaaagcctttcggaatacatgcaggataacaagaccaattccatcgccaatgtgccgacggggctgttgagcactactccgaatcagcaacaggccacccatcttaccgccaccacacaggaggaaatgaccagggcagacagcggggccgtctattacacggacgctcatgacccagacgcccccatccccgggctggaagaagctttcgcccagcgtaaggaaaacgaacgctggatccaaagctatcccaccgccctccgggaagcccagagtaccggaaaacccattctcatctggttccaccattccgtgggcagccctcccagcaaaaagctgggggcagaactcctccatacgaaggaatttgaagactgggcgaaaaggaatgtcgtccgcgtctgttacgaccaggcggaaaaatttgaaagcgaacctgtttacaggaagcgccagaagatgctggagtatgtgaaaaaggctccctccctgtttggcgtgagaggaacgcccgtgcttctggtcatgtctccggacggctccaaagtggatacgttgcgcggttattataccggacaaaacgccctttattttgaccagatcaagaacagcgtcaaactggcgaagcagcaatatgaagagtttaaaaaaacgctgattcccaaaggctaccgggtctggacaggagtcaacggaaataccgtcttcgccaaactttcccgttattcggaaaagacccagaccctctggcttcaggagctggacggacaccagagcagaacatccctgaaaaagctcagccttgaagacagaacatggctcctggaacagaaagaatcccatgaaaacaacggccggaacaagcgctccggcccacgtggcacctgaacggcttttcccctgccgtccggctgcggaacggtttattcatgggcttccgctccatccccatttttgtattgaaatatgaaactgatgttttatttttcctaaaactctcttccagcattttttctttcggggatgtggtcttttccgtaccggcaggaatgcccttgcggacaaattccgccgcttccccctctccaaccattgcctgtttaattcatgattttaacaatgaaccgtcatgccgccaccgccctgatgcttgcggcctgtcccctgtccgcttccgcggaccagcctcaaaagcagacgccggaccagcgccccaacatcgtggtcattgtcaccgacgaccattcctaccagaccctgggcacctgtgaaaaggattctcccatgccttatccaaacttccgcaaactggcggacgaaggcatggtctttgaccggagctactgcgccaactccctgtgcggaccttcgcgggcttgtatctacactggccgccactcccatatgaacgggtacctcttcaacgaacatgcggctccctttgacggttcccagcccactttcccgaaaatgctccaaaaggccggttaccagacggccattgtcggcaagtggcacctggaagccatcccgccgggcgccaagggagatacgtccaaatatgaatccgaccccaccggattcgattactgggaaattttccccggccagggcaactatttcaatccggatttcatcactcccggcaaggacggcaaacgcgtggtgaaaacggaacccggctatgccacggaactggtcacgcaaaaaagcctcaaatggctggaccagagggacaaggacaaacccttcatgctcgtcgtgggccacaaggcaccccaccgttgctggtgcccctccattcagaatctgggccgcgccaaacagtatgcggacgccattgacccgcccgccaatctggaagacgattttgcagaccgcccggaattcctgaaaatgacggaacaaaccctgctcaaccatttcaacgtatggtctgacgagcacctgatcaaggaggtggtcccggaagacatccagaaaatgctttcctgcccggaatccaagaccctgcatactcagtatgactgggaaatgccggaatgggtgcgcatggacccgcagcagaaggaagcctggtacaactaccacaaggcccgtactgtacagcttgtcaaagatattaaaaacgggaaaatcaaaacgcagcgcgacattttgctgcgccgctggcgccattatatggaagactatctgggcaccgttctttccgtggacgaaagcatcggccagatcatggactatctgaaacagaacggcctggacaggaatacgctggtgctctactgcggagaccagggattctacatgggcgaacacggcctgtacgacaagcgctggatttttgaagaatccttccgcatgcccctcatcatgagatggcctggccacatcaggccgggcgtgcgctcctccgccatggtgcaggaactggattatgctcccactttctgcgacgtggccggggtaaataccaaggaaaatatgaataccttccagggccgcagcctcactcccctgttcaagaccggagaacatcaggatttcaaaaaccgttctctttactacgctttttacgaaaatccgggtgaacacaacgctccgcgccatgacggcctgcgcacggaccgctacacgctgtcctatatctggaccagcgacgaatggatgctctttgacaaccagaaggacccggcccaaatgcacaacgtcatcaacaaaccggaatatgcggaaaccgtgaaagaactcaaaaccctgtacggcaagctccgcaaagactaccaggtaccggaaggcttccccggggccaccggcaaactggccgtcaagccgcagtgggactgcgctccctccagagattgacgccgccattcaccgttcctcccgaaacaggttgtccggaacacgccattgacgacggagggacagggtttaaatcctcacacaaacaacaaccattactatacggcgccgcatgaaatcaattttgctagccgcagcgttcctgggttccctctgctgggccggaaccaatccctacaacattattccggagcccgtcaacgtgacgacaacttccggaactaccaaaaacatcaaaatcatccatgagcaaaaagtcgccggactgggcaatgaagggtatgccatgaaactgacgcccggcggcgtggaactccgttataccacgcccaacgggaaggccatggccatggcgaccctgttccagctccaggaccagctttcggatactcctgagggccttccctgcggcagcatccaggattcccccgacttcggctggcgcggcatgatggtagacgtaggccgctaccactatcccatgaaggagatctacaattttgtggacgccatgcattattacaaatacaacgtcctgcatctccatctgacggaagaccagggctggcgtctccccgtgccgggctacgacaagctccgcaccatcggcgccgtccgcccttccgctccggaaaaccagaacaattccctgctggccaatgaaggcatgtataccaaaaaggaactccaggacctggtagcctactgcaaagcgcgcggtatccaggtgctgccggaagtggaaatgccgggccacaatatggccctggccgcgtcctatcccgaattctgctgcaacaccaaacgggcccaggtatggacgcacggcggcgtttcctccaagctgatttgcccgcagaaaccggccaccaaaaagtttcttaaggataccttcaataccgtccagcagatattccctttcccgtacatccacatcggcggtgacgaatgccccatgggagactggaagaaatgcccggactgccaggccgcccgagccaaaaagggccagggggataatgtggaagtccagatgagcgatttcacgaaaagcctgacggccatgctctccaagcaccggaaaaagcccatcctttggtatgacatcaacaagagctattaccacaagggggaaaccgtcatgtcctggctgccgggagaattcccgcgttgcattgataagacgaaggaacagggcatcgacctcatcgtcaccccccagttcaagtactacctggcgcgtacccagatgaaattcccggcggacgacgtgcgtgcccggcccggcggagctcccatcctgctgaaagactgctacaacttcgatccccgcaacggacgggacaagaatgacgtcaagcacatcaagggaatcaacctctgcatgtgggcggaatggattccctccggcgaattgctgatgtacatgacctacccccgcgccatggctgtttccgaaaccgcgtggggcagccacaagaaccgtccaagcctggaagagtttgaaaagaaaatggaaacccacaagaaacatttccagaagcgtttcggctatactctggaacgcactgtggaaaacaaaccctaccgggaaaaaattcatcacccaggaggaaatcgaacgtattaacgagaattataaaaagggccagcaaaacgcggacaaatagcgtttccttttctctcgccatcctctgatttcttcaaagccggggacgcggacaaccgcggatccccggctttcttttcccgcttgaccggaaagccctcttcccttctaatcgttccgccatgttacacctttacgatacccgcaccagaacggcccaggccatttcccccatggatggaaaaacactgcgcttttactgttgcggccccacggtgtacggcccggcccacatcggcaatttccgcactttcgtgatgcaggacgtcttccgccgcgtcctggagctgggggggttcccaccacgcacattcgcaatctgacggatgtggacgacaaaactatccgggattctcaaaaggccggcgtttccctggcggaattcaccgctggctgggcggacctgttccaccgggactgcgccgcacttaattgcctgccaccccatgcggaaccctccgccgtgggccacattcccgaacagatacgaatggtccaaatactggtggaaaaggggcatgcctatgtctcggaagatggttccgtgtatttcagaatttcttccttcccggaatacggaaggctttcccacctggacgaacgtgaactggatttaggaaaaaccgccaatacccggtccaacgcggacgaatatgaaaaggattccgtggcagacttcgtgctatggaagagccgcaggccggaagacggcgacaacttctggccctctccctggggagaaggccgccccggctggcacctggaatgctccgccatgatccataaatacttcggcaatgacttcgatctccattccggcggcgtggatctggtgttcccgcaccatgaaaacgaggttgcccagtcccgctgcgcctgcggcggcggttttgcgcgcctgtggttccatatcacgcacctgctggtggacggcggcaagatgtccaaatccctgggcaacatgtacaccctggcggacctggacaaattgggccacaagccgtcagccgtccggtacgtgctggcggggggctattaccgccgcccgctgaacttcaccctttcctccctggaggacgccaaagccgcgctgaaccgcctgtccaaattcgacgcgcagctccggaacgcctccggaacggactccgttccgtcctatgaggaattctgcgcagcccccccggaaccgggcatcttccagccggcctgggacagcctgaatgatgacttgaacactccggaagccctgggccacgtcttcagcgccatcaggaaggcggatgttccctccctgactccggaggaagcgcgccgcatgcggaacgccttccacttcattctggccgctttcggcattcttctgccggaagaggaacaggcggaagcgccggaggacgtgcgcaccctggcggaacagcgctggcaggccaggcagaaccgggactgggcggaagccgaccgcctgcgggcggaagtaacggcgctgggctggaccatcaaggaccgcaaggacgggtacgacctggcgcgcaactgaacggcatggacgctttctcccctattcccaaccacacgggcttcacggccaggagcctgttcacggatgcgcagggaaccctgaaggacggagccttcgccaacatggaacccggaggcggcggccctctttccccgcaccgccacgcccacgcccatttattcatcgtcacccgcggaacggtcgtcatcctgcttgacgaagaggaaaaaacggtccgtgagcatgaatccctgctcgtgcccggcggcgtccgtcatgccgtctggaacaggagcgcggaaccggcggaaatcgtaggccttacgctggaagccgcccgctccccccaactacctacaacccgatgaactcccgccaacgcacgctgggccatgccgccgccctgatgaccatcctgatctgggggaccaccttcgtgtccaccaaggtgcttctccgggactttacccccgtcacggtgctcttcacccgcttcgtgatcgggtacgccttcctctggtgcctgaggccgcgcctgcttccgctctccggctggaaaaaggaactcctgttcgcgggagcgggcctcaccggcgtcaccctgtacttcctgctggaaaacatcgccctgacgtacacattcgcctccaatgtgggcatcatcgtggccgtggtgcctttcttcacggctcttctggcccacttcctgctgaaaggggagggcttctcccgccgcttcttcctggggttcgccgccgccttcacaggcatcttcctcatcatggcgaacggcgccttcgtgctggaactgaacccggcgggggacgtgctggctctgggcgcggccttcgtctgggcggtctattccatcctgatgaaaaaaatcggcgtcaacacgtccaacatgatcatctgcacgcgccgcatcttcttttacggcatcgtgctgatgattccggccctgttcgtccttccggtgaacatggactggcatctgatggtgaagcccgtcaacgccctcaatctgctgtacctgggcctgtttgcctccgccctgtgcttcctctcctggaaccgcgtggtggaaatcctgggagccgtcaaatccagcgtgtacatttacatggttccggtcgtggccgtagtggcctccgccatcatcctgggggaacgcctgacctggatatccctgacggggattctcctgaccctctgcggcgtcacgatttccgagtacaggaaaaaaacgcggaagagcgtcagagaaaagggagaaaagcccgttctgcaaaaaggctgattccccctgctttccggaatcatgctgttttttccaggaagaaaaacggctggcgaatattcccggacggaatgcctccggcgttgcaacgctttccgcccccagaggatggctgttagcggattagatatccggtaacggagaagggaaaatggaagtgaatgatggaacacatcctcaatgattcatgaatacggaacttcattgcatcttgaacgtatttctgattattcccctttgcccgcggtgaaactcgtttttttttcaaaaaattttttgttgtctgcggatatctaatccgctagtatggcgcgcatgaaaaagctcctttccatcccagcttttttactgtgcatttccggggtacaggcggcaacgacattgtatgaaacccagttccgccagaccgccatcaatgtggacagtgactttctggacggcgcttccgtctcgctcaccaatccttccacatccctttccggcaatttggccgcggacctccttgtccccaatgtccaaatgcagaataacaacgccggatggaccgttaccttttccttcacggctacgcaggacatcatcatctcttccctgaacctgggcttccaattcgtcaccggtaccggaacacggcacggaaacacagattccaaaacgggaaccgctaccgtcacgctggccgccggagattcctctgccacggctgatctgagcttcgaacgcgtccaggccgacaagaacggcacgccgacagcggacatccagcaagcctccttcaataccccggtcacggtcaaggcgggagaaacctttaccctcaccgtgaacgccaaggcacccaacaccgggggcaccttcctggggctttcccaactggccctccacggggacgcagtgccggaaccggccacagcctccctcggactgctcggactggccgccctgctcctgcgccgccgcgtataagcgggagcatcatttaatctctgctttattcctttactaaaacaggaccgtcccccaccgggaaacggtcctgtttttttaaataaaaatccgctcaatttccggaaacgtttctttccgcctcttcttcaatacgggcttccgtctcttcaatcttttctgaaagatcggcccactgcgtaaaacaggtttccaactggcggtccgcctgctggaaccgggtggtgagctccatgacggcctccgtatcagccgccacctccggacgttccaactgggaggcgatctccgtcttttccgtttccagacgcgctatctccgcttccaactgttccagtttttcctggaggggacggagcaggcgcgcctttttctggcggatttccgcctccatgcgcctgcgcgccttgcggtccgccccggctcccgggtcagccgctccggagacggcagacgcagcggaggaagccagagcctggtcccgctccaccttctccagataatcggaaacgttgcctatgtaaacgcgcggtttctctcccggcacgaattccagcaccttcgtcacaatggggtccaggaagctgcggttgtgggaaacgatgcagtaggaacccggatattcggacagcgcctgctgaagcacctgctgggactggatgtccaggtggttcgtcggctcgtccagaatcaggaaattggccggatgcagcagcatgcacaccagcgccacgcgggagcgttcccccccggagagcacgcccacgcgcttgtgcacgtcgtccccccggaacaggaagcagcccagcaggttccgcaccatgggcgcggattcccgcgtagcggccgcctccacgcattccaggaccgttttttccgggtccaggtcatcggcatgcgtctgggagaaaaaagcgatctgcgtgtggcgccccatcgtcacgctcccggagctgggctcctccccgccggaaatgaggcgggaaaacgtggacttgcccgctccgttcacccccacaatggcgatgcggtccccctttacgatttcaaaatccacatcctcaaagacggaaatggagccgtaccgcttggaaaccttttccagcctgaccacggaatgcgcgccggcaggcggggtgggaaaatgaaaattcatcacggcgtcatcctcctccacctcaatcagctccaccttctccaactgcttgatgcgggactgcaccagggaggccttggtagccttgtagcggaaccggtcgatgaactccttcgtcttggcgatttcccgttcctgggcctttttctggcgcagcagaatctccttccgcagcacgctttccttcaggaaataggaaaaattgcccgcgtactcctccgcgcgcccgtggtaaaaggcaatcgttcgggaaaccagggaatccagcagcgcgacgtcgtgggaaatgaggatgatggccccccggtaggtgcgcaggtactgttccatccaccgctgggattgaatgtccaggtggttcgtgggttcgtccagcagcagcacttccggttcccggagcagcagcttggccagcgcaatgcgcatctgccagccgccggaaaattccccgcagtcccggtcaaagtcccggtccttgaaccccaggccgcgcaggatggactccgtgcgggggcgcagccgggcggaatcatgggcgtgcagcaccagctccagttccccgatctcgttgagcacttcggaataggcggcggaacgggggtccagtttctccatctcctgcgtcagggcgtcaatgcgctcctggaggtccatcaggtccgcaaaggcggacatggcctcgtcaatcagcctgcgcccgcggacatggatgccctcctggggcagatagcccacctgggagtgcctggacttgatgatggagccggaatccggctcattcaggccggccatgcacttcatcagcgtggacttgcccgcgccgttatgccccgccagggcaattctttccccatcctccaccgtgaaggaaagatcattgaacaggacgcgcgcgccgtactgcacgcgcagattttgaacggccagaaccatgtaccgaatgagtagagagaggaaggcggcggaacgcggcgttgcatcgcctgttccgccgccaggaaaagccggataagcttatttgtccagaaccttgttccacgcggcgatgcggtcggcctgctccgtgaacagatcatccgcgccatcttcaatcgtgataccggaaatggtatccccctgcccgatggaatccaccacgtcctggccttccgtcaccttgccgaagacggtgtgcttgccgttcagccagtcggtaggtacatgcgtgatgaagaactgggaaccgttggtgccggggcccgcgttcgccatggaaagcacgccggggccgtcatgcttgaggtccgggcggcactcgtcctcaaaacggtagccggggcctcccatgcccgtgccggtggggtcgccgccctggatcatgaaattcggaatcacgcggtggaacttgaggccgtcatagaagcccctggaagccaggttcagaaaggaagccgccgtcacgggcgtcttggaagcgaataccgtcagcttgatgtcgcccttggaagtgtggatggtgatattcttgtcagttgccatgggtgcatgttaaacgcgcggaaaggcatggtaaagactgtattgcgtgctgccgccgggcctgcgcccccatttccccgccagcctcttttcctccttttccatgccgggcaaggaggccgcccccgcggcgcctacctgtcatgacgggccctaatgacaggaggaacggttgattttctaccggaaagggccgaatttgaatgatatgagcgaagaattggtagaagaattcgttacggttgaatccatctttgtccgtgggcgcaactgcctgacgctgaaggcgaaattctctcccctgttcacagactactaccttcatctcatgcagtacggcctgcgtaacgaggaaccctacgacagcctgctgaaagagctgatggcctacttcaccctctacatggtcgcgcggccctgggcggaacagcacgcctggacggtcaacctcagaacgcccgccgtagccaacctgttcgttacgggctcctccctgacggaatccgtagtggggcgcatcttcacgcaggacatcaaggagcctgaggaaaacacgctgtactccaccctgctccgcaagggctttgaaccgcggtactccgtcgtccccattccgggaacctcccccgcccggtgggtggaggaattctacaagcagagcgaacagagaaacgcgcgctgcattgaactgccggatgaatgctacaccatggtgacggcccagccggacgcggatgaagaatggctgaattctctaacccgggaaaaaatggcccatctggaagaagatgaagatacccgagtactggaaacgcgccggttccgcttttactgcggctgcacgctggaccgcatcctgccgacgctcaaggcgcttcaggaaagggaggaagacctgttccagggggaagaggcgctggaagtcacctgccccaggtgcgccgccatttaccgtgtgacgaaagaaaatctggaagattgagacatacatgatttctttctgacaattagccttttcggcagcgaatttcgtgcttaaactttccccgtgccgacttgtccgaagtgtttacataatttccaccgcggggcggaatcattgtgccctcactgcggcttttccctggaaaacctggacaagaaatacggcagggactccatcccctaccgccgcgtatgcgacaacgccggcgccctgcggcagcaggaccgcgtaaagctgaacgccctgctggaaaaactggagcgccgcattccccccgtcctcctttccgtctatttccccaacatcctggagcccttttccctcattccccacagcttctggatgatgaaccacctgacggtggacgaagccggcttccccaaccaccagggcccgctggacccccagtggctcctgattctggtattggacgtgcggacggacacggcctgcttcatgtgggggtatgaactggatccctacgtagagccggacctgatcaacaaatccatcatgaaggcccgcatccccctgcgggaaagcatgctgctccaggccgtgggctccatcatgaaagacgccgtccagctcgtggcccggaaggcgcgctccaaggtcaggcaccccatgcgctacgggttgacgccccctccccccgcaaaccggaaaggaggcggcctatgagattcctgctgttccccttcatgctggcggcggccatgtgcttggccccggcgcaggaactccccgcccttaaatggaacgcccgtgaccagcaatccctgatgaagggcacctggtgggaggccaacgcaccccttctgccccctgtggatgcggctgtggccccttccgcctccgtcccggaaccctccgccaatgcagactcccccgctgtggaccctgttccggaggatttcacggacgtcaacgaatacttccttccggactacatccgcacctccacgggcctgatcgacccccagaagcttctcacggaagtggagagcaatgacgtcattgaactcatcaagctcatcaaatcccgttacaacgtcaacctgttcgtcagcatcttcgcggccgggcagaaagtccccccttccgtcaacgcccccacaatcgcccgccagatattcaaaaacaaggaacggaacctgctcctccacttccacatgggggacattaaaagcgcccagatcgcgctggatccggagttgagcgcccagctcggggatgcggggcggcgggacctcctgtaccaggtgaagcaggacgcctcccggttcaccaacccgcaggacgagcttgttgaagccatgatttccctggcgcggaggacagaggcggacatggcctccgcccccaagccttccctgcccgcgctggacccggacaaccccgccagcatcccggaagccaacatcaccatccaggagccggaggaagcgcgtgaatcccatctgcacgccatgatgaaggcctggatgtcctttgccctggccaatgtagccggcatcatcctgcacgcctccgcactggtggccgtagtggcgctctggctggtctggaaaaacaaaagagtggtgcgtctgctgccgtcagaaccggacaagcgcctgggcgctccgcacggcgcctcccagagccgtcccgtaaactactgcatgcaggacggccgtggaccggactccatcggccgcaggcagatgcgccagcacatgcgcgacgtctcatgacagaaccatctccaacccccggcatccgcgccgccctgaacggcgcgggagaactggaactcaccatggtgaacgcccctgcgggagccgtcatccggatggacgttaatgcggcttccccccgcatgctctgcacgcagggccgctacctggctccggtgcaggccccgcccggcacgcgcatccgcttccgcctgttccaggggaagcgcggtctgacggccccggaaaccttcatcatgcccggagctcttcccgcccagcccgttccttccgcgctgattccctgcacccagaacagggacttcatgatttacgactgggcggcccggcacgaagccgcttgccgcgcggtgaggaaaacgcatccggacctcctcttcatcggagactccatcacgcatttctggggagggcctcccgtggacgaaccgcaccgggacatcctccagaaatctccggaaacctggagcctgtgcacggagggaatgagggcggtcaatctgggcttcggctatgaccgggtggaaaacgccctgtggcggctccgccacggcgaactggacggagcggcggacgatgccgtctgcgtggtgcttcttggcacgaacaacctcgcggaaaacacggacggggaaatcctccagggcatccgcgccgtctgcggggaaattaccggaaggctgaaaaaggccgtcatcatcctccagggcttctacccgcgcaacagcgcccgtaaagataccgcggaacgcattgccgccatcaatctcctcctgaaccgtctggccgcagaacagggcttcctgtacacggaaccgggccgcgtcatggcggacgccgcaggacacgttccggaaaaactctccagcgacgggctgcatccctccgcggccggctatgagcgcatcgccgccgtgctggcccccgtcatcaggcaggccgcggaacggaaaaaatgacgccgccaagaaaccggacccgctttccggtgtttttattcatggaaacctcagcagaaacaccacaatgaacgaacaggacgatacaaaactctggcagattctgggccatgcctcccagcctgcgccgggggatgattttgcccgcagggtcatgatgcgtattgccggggaagaacacgccaccgccgttccggtggaatccatccaccacttcaagcggaactccttccgcatctggggcgccgcggcggcggccctggtggctgccgtcatcggcattgcagccctgatggaaccctctgctccggaaacggctcccctctccatcgccaccctgaacattgacgatgtgctggtggaagaagccggcctggctctgggccaggaaaacctggtggacgctctctgcgtgctgtcctccacggaaacgggcgtcatctcctcggacaacatccaggacctccttctgtaactccggaaacggaagcattcttcgttcccggcccagggagcggaaactcttcgccgggcaaaccggatttctttcctccccgtcccgaatccgccttcctgaaaaccggttttctccgtaaacgggaacaccggacaccggaaccgtaggaacgccgcgctgccccggcccccactgttataaagccttttctcttccggccatggctgtgcctcccccggtctttccagtctccatccggaacggaaggcagagtttccaaaccttctacctggccccggaactggtggagaaaacggccatccggacggggaaaatttccgctgccgacggttccctttgacgtgcacgcccgtatcgtttacaacgggtttactccatgcaggacttcctttccaccgttattctcctgttcatcgtcattgatcccgtgggactggccccgatgattcagggaatgctgaagaaatattcgcccgcccagcagaaggccattctgatgcgggagcttgtgtttgccctgagcctgctgctcctgttcttcttctccgggaaattcctgctggacctgctggggctggaaccgtccaccctgaatatttccgggggcatcctgctgttcctcgtggcgctgggcatggtctttcccgccaaggacatgctctcttccgccggacgcacgaccggacaggacgaacctttcatcgttcccatcgccatgcccctgatggccggcccctcctccctggccatcatcatgctgcacgcctcccagagcccggacagcatctcccagatgacctatgccggcgccatcgtgactgcctggttcctctccggactggtgcttttcatcgcgcagaagttcctgcgcctgctgggggaaaaagggacgatcgccctggaacggatgatgggcatggtgcttatcatgatttccgtccagatgtttatgaacggcctcgccggatatggcgtaaaataggaaagggctttcaccatgctttggctcctgcacggtaacctgggatctccggcggactggaagcccgccatggaagccctgcgcgccggaggaatagaagcccgcgccctgaacctgtggaagtatctggaatgctgccccaagagcctggaggagatggggcgcgtgctgtgctctgaaatagccgcccaggacaagcatccctggctctgcggttattccctgggaggcaggctggccatgcaggccgttctggcccatccccctctctggaaaggcgccgtatttgtcagtgccaatcccgggctggaggatgaagcggaaaaagccgcgcgccgcgcaaaggatgcggaatgggccgtcaaatgcctctccgctccgtgggaggattttttaaaggaatgggacgcgcagggcgtatttgaaggcggcccgccgcctccggaccgttcttccctgaaaccgtggcgcaaatccatctcccgcgctttcatcgactggtccgtgggcgcccaggaaaacctggccccgctcctgaagcagtcccctgttccccagttatggatagccggggagcgtgatcccaaattcactgccctggcccgtcgtgcggcgggggaacaagccgtcatcatcccccgcgccggccaccgccttcccctggaagctccggcgcggctggcggaaagccttcaacaattcatcctgcaaaacccatgaacgatcccaaaataccggacgcggaagatttgagacaactggtggaggaaatcgcgcagacacacatccccttcggcatgtacggccccgccaagtaccctcccaagggctgcccgctgatggacgtaccccaggaatacctagcgtggttccaggccaagggctttcccaagggaaaacttggccgcctgatggaacagtgcctgctgctgaagggtaacgggctggacccgctttttgaccccttccgcaaagccaacggcggacggacgaagaaaaacgcccgccgccgcgtgtgggattttgagagcgaataactttccctccggaaggaacgcattcttcctgcgtcatcaggaggggggaacgagcttcacttcccgccttgtcccgtcctcttccgtgacggccagcacataaaacacccggtcctccttcttcccgcgcgtgacggtaatggtcaggctgccgcgggacagcttcacgccatcctccggaacggagaaaacgcccagctttcccagcagttcaagcgccctggcgccgtccctcacacggatggtctggccgtcgcctgaaatttgcttcttcacgtcccgccacgcggcggccagctggcccggttccctctgctgcatctccgcccgggaaagagggggcagagccatgcaaagcacggcggacagcatgatcaatagtctcttcatgacagggaggcggcggggagttgcttgttaatggtagcctggaacttttccagggcctgcatggcgtggtcggaagccttccggtcaatggaaagcttcaacccgcagtgggggcattcaatgccgccggacaacaggtccggaatggtcgtggggaaatacactccgcatttgggacagtcaagccccggagtgcgctggtaggaataagtggttttctggtccatgtttttttctttcaattagttattttttctcctgggagggagaatcttcataatgcggcctggaggtcagctggaggaattgggacaagccggaaggcatgtccgcctgctgcatggtgacatggattttcatgttcgcctgcagggaggaagaggaggaccccctcccggactggggcgccagggaagcgcggaagttcaggccgtcatcctgccctttcccggcgggggaatccacctcccccttgttcagggaaaaacgttcgtccggagcggaggcgactgcgtcaatgatattgatgtcaaagtcaaagtccgcctgcttgatttgcagcagcggcagcgtcaccaggctgatgagcggcacgcttactttcttctccgctccgccggaagcgtcgctgtccgtaaaattaaagctgatgagcctcagcgcccccgtggaaccgtccgcaggattgtaggactcaaaagccagggacatgaaatgcttcatgtagcgttccgtggacatcgcgtccgcatcaatcgtcgcgaccagcggggccgagatcaactgctgcaggctcatgatgtgcccgttcaccttgttgtttgtagaatcactcataataatatcactattgtgcggccagtccggaaacgtcattctgctccgccaggacggcgggaacggcggcgggcgcgatgttgaggtgaagcgtctggatggagttctccggcatctttttcagcttttccgtctccacctccacgtccaccactacattgcttacctgccgggtgaacgcatacttttccgcaagcacgtcaatgaaggaggagaggccttcccggaggttcgtgcggcactcctgcctgagggcatccccctgggcaccctgaaacaggtcggccagatcgggattgtccatgaattccttctccgccacatccgccagaagctccgccagcaatcccttgtccagtccggagtccgcccgcaggagggccccctcatggccggaaacagccgcagtgatcttcttccccaggtagaggcagaaattccttttccactgttcctccctggcaagcagggaggaaaaatcacttctcgcctcatccgccgggagattggagtgcaccacggccatcacaatggaacggatggcatacgcaggcacccgctccgccagttcctgctggaacaggctgcactgctccgcatccagcacctgcctctcctccaccccggaggttcccgtcaccgcatacttcaaatcgaattccagggaccctatctgggcgctgggaagctggaagccacgcacaccaccgtgcttcccgtactggcgtgccagccccgccgcatggcagttcgccgcgtgctgcgcttcgataatgtccctaagcagggattcgacaatcagattcagacgagacatggctctgggatggaagagaaatcgttatgctccggttattgtgcaggcgtagcggccacggccaccttcctcttgagctctccggcgctcaccgtgcagttcctggcgtcttccttggaaatcgtgtattccttgccggaatccgttttcacaatcttggcttcattccccgcaccgttatcaaacgggtccgtggcgtcccctatccggagagtgatagcatccggctcaaacaggccttccttgttcttgtaggaggtcatcagcttcacgcttccatcgtcctggatggcatgctgaacctccagggaaccagtgggagataccacggaaatgctgttgttcagcatttccagcaccttggccatcccggcgggcatgctgtcctgtccggcatgaacggccacgtccatcgtgtactccacgctgtacttggagtccttcgtggcggaggagtccttcttgctggaatagctggcgttcatgctgccgcgcgcccagaagcatcttgcagaggcggaaacactggtatctacggagctggaggaattctccgtctccgtactggcggcggaagcgctgatattcgccttgaagttgatgtcaatggagttgatggcgatgtagggaatgggaacgatggtcagaaggggaaccgtaatctgggccatgtggccgtccttgatgaactggaaggagacattcaccgtcttcttctcttctccttccgtgtacagacccacattttggatgaattcccaggaggtccgggccgcctgggcctgggcttccacacaggcgaccaggggaccgccgatgatgttgccgaaaggcagcgacttgagggaggaggtcgccacatctgctgctgatttgtcaattgccatattattttattttctggttgaggttaatatgaggtgccgccttttggcgacgttgtgatcatggggtcattccggcgctttttctatcccgcctgtccggaagaactgttccactttcccgcggcgccggcggccatggccggggtctatttggaaaacgacagcatgttcaggcttcccagcactttctttttcatgaacttgctgacggggatggaaacattccccacctgaaggaaattacccgcaatggactctatgtgtaatttattaaccagataggaacggtgcacgcggatgaaatattccccgtccaggtgctcggccacccgcgccagcggggcggataccagaatggacgacatgccgtgcacgtgcagcgtgcagtagcttccccccgcctccacatacaggatatgcttcatcaggatgcgctggaacccgtcgttcattttgacgaacaccatggggtttctggacagggaaaatccggcgggcctccccaacagcggcgtaagggagtcatccttcatttccatgatttccagcttgtctccgtgctccaccggttccggcgccggggcataacagatcctatcttttttagtgactttaataaatttaatggtcattcaaaaatcatagcaaaaactttaaatactcaataaattcatcaatgaacagcagaaatgaccttctgaaaccaaatttatctcttctgaacggccattggaaaccgtgccttaccaacgcattcaggccgcggaaaccgtattccgcggcctgaatggcacccgtctctgccgggaaaaaacctaattcatcagcgcctggtgccttttcagcaattccaccgtcagcggttcgggaaaggccttcacgttggacgacctggcatcctccctaaagttttccccctcatacagcggcacggggtagaccttgaggatgccggggcgggcggtccggacaagcgtctccgccatcttcatcgccaggggattgccccccgcgcccttgtccgtcacgcagacggactccgttagcatgaaattgccttccgccgggtccacgtaatcaatggggaggccggccttcctgtccgctacggcctggtggcgcaggccgaaggcaatcgccacctccccggcgcgcacctttttcagcggtccggaaccggaattttccagatggggccccgcgttctccatcatgccgtgcagcaggcgccccgcctcctgttccccgtacgcgctgaccagggcctggaccatcagccatgccgtggaggaactgcggatattggggatggagatgaagcccttgtacgccggacttgcaaggtctttcagggaggcgggccggggcagcccgttctcctgaagcgccctcgtattgatgaaaatggccccttcctgcgccgtaaggggcgcgcagaaaccgggcgtcttttccagggcatggaacgtgaaggagaggggggcgaacatccggtgggcctgctgggcgctttccaggtagtaggtggaggcggtaatcacatccgcctcaatgttgctgccctccgccatgatctttccgcccagctccgaggtgctgaaggaggaaaaaatgtactgtccggaaaatccggccctgtccagggcgtcctgcatggctagccgggattcttcgtccgcgttggagtaaatcactacctccgggccttgattgcagccgcccaggcacagaaggactccggaaacgacggcaagcgcgcaggcaatcatggtggactgttttttcatgacggtattttattgttttttggtgcatctggcggcaatgccgcccagaatgaccctggccaggatattcgtggccagaatcaggagggacatcacaaagatggaatcaaactgcgcgtaatgctgcaattccttgatcttggtggtcagcacggccgttctggcgcccaccaggaagatgacggcgctgatcgtgatcatgctgttgatgaagtaatagctgaacatttccagcacggttcccagcgaattgggcaccacaacccggcacagggttttcagccaggaatcacccatcagggcggccgtggcctcccagcccttgttcattttctccagcgaactcttgcccatcaggtagggcgtggtaaagaaatggaccacgttgcagagcaccagaatcaggaaggtgttttgcaggctggttcccgtgaaggcgaacaggaacgccaggccgagcaccatgccgggaatggtgttggtcaccacggatatcccatcaaccgcgccgcgggccaccctccccaggccggagcgcgcggaggccagcgccgcgccgtaggaaagcagggtgcccagcagagcggtcagcagggccacccacagggaattgccgtaaatggagagcaggccgcgggaagagaggatgcgggtgaaccggtccatggaaaattccacctcataaggccagtttctgacgaaaggcaccacgaacatgaccgcaaaaaccgccgcaatggttccgatgacggccagggacccggcaccgcacacggcgtccctcaggcggcttttgacgatgtcctggcggcaaatcctgttgtaccggaaattgtaccgttccaggtaattgatcagcaggatgctgatgatggacggcagcagcatggaaacggcgaccgccgcgccgccgccgaagttcgggatggcccccagcatttcattgtacaaatggatggccaccacgtcaaaactgcctccgatggaggcgggaatgccgaagtccgtaaaactcagcgtgaacgactggatcaacgccgcccccagcgtacccaccagcggcctcacggccgttcccaggaaagtgcgaacggggccgtcccccatcaccttggaaacgatggcgaagttcttgtctacatacttgaaggtgttgttaatcagcaggaaggcgatcggcagcgtgtaaatggtgtagcccagcagcattccctggaacccgtaaatgtccagcatctggaaccccagcagccgcgtcagcagcccttccctgccgaaggagtagatgatgacgaagccgtacgtgatggtgggcaggaacatgggcgccaccgtcattcccgcgatgaacttgcggaacaagggcagcagccccgtattgttcacggcatacgccaggaaaaaggccagcgcggtggtcagcgccgcggaaaccccggaaatcagaaaactgttccggaaggattccaggaatgccgggctggccagcatggccgtgtaattccccaggccggattccccgcctaccaggaaggacttgcccagcagcagcgccatgggcaggaccaggaagacggagaacaccagggcaaccgcccagaacacgccccggatttctatctgggttttatgcataggaaccctcaaagagggaaagaatgttattcctcttgatctccagctggttcaggatgaactgcttcacaaagctgttgctggggctggaaatgatttcccgcggcgtggaatactgggaaatgcctccttcgttcaggatcagcacccggtcggacagggtaagggcctcctccgggtcatgcgtcacgatgatcgtggtcaggttgtactcccgggcaatcgtcttgatgcgggacttgatggactccttgatgacgccgtccagggcgctcagaggttcgtccagcagcaggatgcggggtttcatcaccagcgtgcgggccagggccacgcgctgcttctggccgccggaaagctggtcgatgcgcttgtccagatgttcgctcaggcccagcagctccaccagctcccgcacctcacggggggagctggcccccggcttgttcttcaggccgtacgtgatgttccggtaggcgttcaggttggggaacagggcgtaatcctggaacacgatgttgaaaccgcgccgctgcatgggcgtgccgctcacgtcctccccgtcaaaaaggatctggccgccgtccagttccgccagccccaggatgacgttcagcagcgtagtctttccgctgccggacggccccaggatggagacgatctcccctttccggatgtccaggctgatgccgttcagaatgggaactccgttatagactttcttgatatttttcaactgtagcatggtaaactcctggccgccgcagcggcccgctgggattgatggatgggaagggaactatttgttccggcggatatccgccacggcctccgccaggcggcggaaatcgtccgggaatacgtccccgatattgccgatgcggaaggtaggggcttccgaaatcttgccggggtaaatgacgaagccccgttccttcaaggcctcgtaaaacttctggaaatcaaaatcctcctccgggtacaggaaggacgtgatgatgggggactggagctcgtccggaagcaaggtccggaacccgctccggcgcattccctccaccagcgccgcatggttttcccggtaccgggcatggcgggcttctatgccgccctcctcttccagctccttcacggcctggaagaaggcgcgcaccacatgcgtgggagaggtaaagcgccacttgccatggcccttttccatctccgcccactggtcgtacaaatccaaggacagggaacgggagaccccctcgcaccgggacagggaggagcgtctggcaatgacgaagccgaaacccggaacgccctggatgcacttgttcgcgctgctgaccaggaagtcgattcccagcttgcggatgtcaatgggaatgccgccgaagctgctcatggcgtccacgatgaacgtcaggccgcgaccgcggatcgccctggcgacggcctccaccggattcagaatgccggtggtggtctcgcagtgcaccatggccaggtgggagatgtccgggtgttcctccagcgcgcgccgcacggcctccggcgttacgggcaccgtctccttcagggaaacgaggacgtgattcaggccatggcggcgggcgatgtcccccatgcgcttgccgtacgcaccgttggcgacgatcagcagcttgtcctgcggcctgacggcgcagctcagcgtggcttccacggcataggtgccgcttccctgtaaaagaacggtggtgtattcgccgtccagtccggccagcttcaaaagctgttcccggatgacggtgaccacgccctcgttgtaatccttgtcccaggtgcaccagtcctgaagcatggcctggcggacggattcggaagtgctcagcgggccgggggtaagaagaaggtaatttctcatggcagatgaatggttgaaaggctagcggttcatggaggcgttgatctcctcaatgcaggcgggcagttcacgaatggaatccagcacgtaatgcgctcccgcgtccagcatgcggcggcgcacttcctccttcattctgttcaattctgcggcgggcatggcctcatattcctcctcgctcaggcccagttcattgctgcccgtgatgatgcccacggtgtgcactttcgcactcaatccttcccggatatccgccatcgtatcgcccaccttcaccacctggtccacggaggggatctccaggtcaatcatgttccggtaaaccatgtacggcgcgggacggcccgcgggaacttcatccggcgtcaccaggttgtccaccacataaccccgggcggcagccccgggacgcacgatgtccatcatctccgccgtgtagcccgtggtggacccgactttgatgccccgggccttcagcccctccagcgtttccaccacgccgggaatgggtgtggtgaaatccttcagggaggcgaacaggtgcgtttcaaacccggcgtaaagctcccgcacgtcggcctcattccaggaacggccatacttccgttcaaactgttcgcgaaccggatccatttccagaatggcgcggatgtggtccactttcagcaaccccatgggttcccgcgcctgcctgtaggtgatatccaggcccttttccctgaacacgctcaaaaaaacgttcaaaggggcgaaacagccgaagtccacggccgtaccggcccaatccatgatgatgcaactgactttattcataatctgtaatgtctggtcgttgaaggagcagcagcggcggctttcctccgggaacagagccaacctaaaaccttccccgccgccggacaagagccgcctggttgcaatgttgtcacataaacggcgccggacacggtcagaaattcgtgtacgcgccgcagataaacgtccaccccgtaaacccggcggaacggcctccgcgggaatgcccgtactccgccatcgtcatgatcttcagccgcgcgggatcgtcccggtacacaaagaaattcaacccggcggccacggcctggtagcaatccacgcggttccctcccctttccgccagggaggcatagcgcttattcggcttcacggcgtccggaccgaatgcgagctggtagcgggcgaccgcctgcacatgccccgtcaggttgaaggacggcatgacggtcagccccgccaggccggacggagctatcacgccgccggaggaatattcccgcagccgggaagcccaaaccgcctgggccatcagctcaaatgcgccctgctttccgtaataatacagcgccagcacgttccgcgccccggtgcccgtgtaattgccgtcgtaggggcggtccttcatgtccccccaattgtaaatccagtcgcagtacagccgcccttccttcagcagcaggccgtccgcgcgcgcggacaggcccaggctcatgttcacggactcccaagtgccccaggttccgcggctcctctcgtccgtgttggaccacaggcccgcgtaataccccagcggctccttcttttcgtcattatagctccagacgccgaaggaactgtcgctgaccagcatgttttccacggcggaaatctccggcagcttatacttggaactggaaatgcggttctccgccagaatgacgggaagcaccttccccgcacccacaacagcgcccggcagggaatattccagattggcctcataaaggttgccgcgggtcattttgtggttgttccagcgtccgcccttgtaatagcccagactgtccacgccgcccatgttccagatattagccactttcaggtcccggagcaccctggcgttccagcccagcctcagccgccgccattcctccgtgcgcccgtgggagccggggtacgtttcagaaccgttgggagccacggccgccgcctggtactgggcccgcagggacacgttgaactcctgaagccacggattctcgccattcctgtacaaatgcacgttgccgggatgggctccgtagctttgcgcccagagtccggacagggaggacacgccgcccgccgttccgttccaggaggaaaaaccttccgcgccacacgcaaagccggcggcgcagccaaaacaggcggcatagaaaaaagaggctagggacatgattccccaccatagccgttccggaaatcgcctgaaccattttcaggtcaaaaaatcgccacacaagaaacctgttttataacatcacgcttatattttgtcctatcccaactgtatttcttgaatcattctagctcatgccggatgtctcgcgcttctttatacaatttttccgcctcttcctcctgcccttggagcatccgcaagttcgccattcgttgtagggatatgatcaaatctttcttccaacccgcgttgcttccgtccctctccaccagctccctcatgatgcacaggctctcccggaaatattcctccgcctctgctttccttccttcggacagccgtagatcccccatccggtccagcgagacggttaaatcccttttccagcccgcgttgcttccgtcgcgggtcaccagttcccgcatgatacccaggccctcccggtacaattcctcagcctctccttcttttccctgcgacatccgcaagtctcccatccggttcaagaatacggtcaaatccctcttccagcccgcgttgcttccgtcactgtccaccagctcccgcatgatacccaggctttcccagtacaattcctcagcctctccttcttttccctgcgacatccgcaagtctcccatccggttcaaggatacggtcaaatccctcttccagcccgcgttgcttccgtcactgtccaccagctcccgcatgatacccaggccctcccggtacaattcttcagcctctccttcttttccctgcgacatccgcaagtctcccatccggttcaaggatacggtcaaatccctcctccagcccgcgttgcttccgtcgcgggccaccagctcccgcatgatacccaggccctcccggtacaattcttcagcctctccttcttttccctgcgacatccgcaagtctcccatccggtccaaggatacggtcaaatccctcctccagcccgcgttgctttcgtcgcgggccaccagctcccgcatgatatccaatatctcgcgatataacgattcggcctcatccttcctcccctgaaccctccgcaggtcccccatccggttcaaggatacggtcaaatccctcttccagcccgcgttgcttccatctcgagttaccaattctcgccggtcttccagacttttttgatataatacttctgcctcttgcaaatttccttgaatactcaacacatctccaaggcaagtattagcttcgtttagctcttgtgtccattttacattataaccatcgattgttacaagacgcccgacaatttctttatacttattataaaatgtaacggaattttttatatttccttgtaattcatgtatttttcccattagaaataaaatttctcctagatcaactcgtctttctgtattttcactatcttcgcccagtaactgctctgcaattcgcattgacatattgccatactttacagcttcttccaacttcccctgtgtctttaaaatcacagatattccctttaaagttaacagtttatctcttctatgttttatatgtttatagggattagaggacaagttttcaacaattttctctgcctcttgatactgctccatcgcattttccaacaatccctgttttatttttacatcacccaaacaacgtaacgctgtactcaaatcgtgctgaagctgggtattattttttcttccttccataagagaatggagtgtactgatagattctttataccatccttctgcctctccaaaaataccttgttgaaaagcaacatcaccaatcttccgataggctaaaattaaatcacgctgccattccacgttattcgaatccttacaaaccagggcctgcgctgcttctcttgaacgctgataataaccggatgcttccttgaacaacccataccccatgctaatatcgccaagcttgttcaaaataattgtttgttcatgaatatattgatcattaatctctccttcctttaatagctgttttaataactccaaggcctttctatacttctcctgtgctctgtcacaaacattgcgcaaacggaacatgtcaccatccaaatgcatggcaatgcatttagaaaaagcttccgctctttgaagtacttcagattgtttccgcgcctggttttgaaaatcatttatgtttttttgacattccttatcaaaatctcttttcttgctccatgtccaaacccccagcatggcaacaaaaagggttccacccgtcaaaatgaatgtcatgaaacgccaagaagcctcatctgcgcggtccgcacctttttgaactctatccacataatcctgcaaatgtgtcaacaacaagttccttccgttccagttgttttcaagctggatgctttcattcccaaaatggtcctttaattgaattaaggaatcccggcgcttttggagatcaaggattttagacatcctattagaaagctccttgtaaatttccaccttttgccgagaactctcttctggagcatggttgtattgccacctcagagcaccatataacccgtgttcagcgtctatttgccgttcgatctcctgtattttggacaccatcttgttcttttgcctctcatgtgtctcctctctcctacaccccggcaagcagaatattcctaatgacaaaaccaaaattacaatgaccgaaatagtccaaaaaaatgtatatttcccatctttgagaaacacagtttttttccgcccatttttctcggcagaagaattattaatttttcccttttgacacattacaatagaataaaaaccctattttacataaaaatcaaccattatgtgtagtaataattttcccgttaagaaattagaatagacagcaaatgaagaatgactccatcgctaactttttactaatccacagatataagaatgagagtaatcctcccaatcataattgattcaaaattccgcctgtttctccggacataatttcctcaaagacccactccccgaacgtccattcctcattctcccctttggcaagggcgaactgccggaagagttcccggaacagctccctcacttcgccaaggggaacggcgcggcgcagcaggaacgccgtcctgtcgccctgggcgcgccctccggcaaaaacatcgtaaacgccctcgctgcggcccaccatggccagctctgcaaacagggggcgggaacagccgttgggacagccggaaatccggaacaccacgggttcgtcatccagcccgaattcatgcagaatttcttccagccatccgttgagctcccggtggaccagggaagaagcggcgcgggcgcggcggcagcccggcaagccgcggcaggagcaggattcaatggagagcggggaaaaatgcctggacccgcgcagcagtaccttgatgcgttccgccacgcacctgtccgccggatgaagcctcaaattgccccgcggcgtgatgcgcaccggagaagtcaaaaaagggaccacgcgccgccatgccgacgccacggcatattccggcgtatcctccagactgccggaagggagcgccaccagcagcccgttatagaaatcattgcggctccactccccggaagaggaaaactcaggttgctccccctctcccgggtacaagccggcgtttttcaattcattcagaacccagtccaggctgcgggaggcgaacagcgacttcaatctcctcttgcgcggattgtccggttccccgaactgttcattcagggccgtcagcacccccgccgccttcacggcctccggcagggaataccgccccagccaggatgccgcccgcggcgccagggccgcactgcccccctgaatgccgcccccgcctccggcaaacaaatgcacgccgccctccggatggcctcccttgggaaccacaaagcccaggtcacaggaaaacagcccgaattcatggtgcggagcctcttccagacaaatacgggcgcgcttgtgcagggcggaaaaacgttcttcaggctgcgggtccgaggaaaaaagacgttcgcggtttttgcgtatttcatacgcggggaaggaaacgggagcggaaaacctgttcaactttccggcgaactccagccatgcgtcccggttttccccccagcagagggaggaacctacatccacggcctgttccgtatagggaaccaggcgggaaagcttttccgccagggcaatgcccttctccacgcattcccgctcatccaccccgtccagaggaatggacagggtggaaaaggaaacaaggcggcatccgccgtccacggcgtccagaacggcctgccactgggcgggttccatccatcctccgcaaaacggatattccatggtgtaggtatttctcatgatgaataaaatcagactcgcgccgtcgccaggaacaccacgtgcatgacggaaaccagcgttacaaaatacatgtccgcccgcgcggacggcacagaggagaagggaccggccatgccgaggcccagagcgccgtgggaacaccgggaaatgcagtcccggcaaagggtgcagcgcctggaaatgcggcaggccccgccctcgcgcgagatggcgaggtcacggcaggcggcggcgcactgcatgcacccggtgcacgtctccttcacgcgcatgcgccagggggacagcctgcccagcaaaccggcggccagccccatggggcaaaacctgctgcaatattccctcacgccgcccgcggcgctcattctccaggccaggggagccaggaaagccgcggcaagcgcaaccgccagggcgtattccaccgggagtccccacagggacaggagcagcggcgttcccaccgctgcggcgagggccgcccatctccagtcccggaggcccttgcctcccttcaccggacgcccctttctgcgggaggaggcggcggacaggcagtcccacaccccgaagtagcacagatggctgcaccacgcgctcccggccagaaggacggatacgctgaacagcgccagcatgaagatgccttctccccggtaaaccgggccggaaatcatcatgaacggcacgggaacatgcagcctgcccgtcatcagcagggaggaagccaccgtcacgcccagcagaaactgaagaaaaaacacggaggcgaatacggtccacatcagccgccgcctgcggggagacgcctgcggattcagcagcccctccgcacaatagcctccccaccaggccagaagaagaatcacgagtccgttgacgccctgccacggcagaacacgctctcccagcagcaggcggaaaggggccagcgcatccagcagaaacagaaatagcacggaggcggaaaacacgcggctgcgcgccagctccggaacaggcaaatccttctccccgcgcctgcgccacaggatagccgccgcatgaagcagcagcacgcccgccagaatggcggccagccgcagaaacggcagtccctccatcatccgcagcctggccagatgccaggtttccgccccccagaaaagcagggaggccagcagcaggaacgtgacgctcctgcggagccagccgcgccgggaaaacgaaagcgccgccagccccatgcacaaaatgacgcccgcatgcatcccgccgcgcaaaaaatgggcggccgtcatcagaaagcagaacaaggagatgagtccggggccggtcatggcatcgtgggcgcctgtctggcacccccaacataagtgaaaagaccgggcgctccagaaaaaaacggttcatccgcccgtgaagggagcctcattgcgtcacccctccgccgctccgtccggaagcctccggaacatgcggaagggcgccgttccacggcggcgaaagccgcgggggcgccccgccggaaacggcggcctccatgcgtggacgctgtccagccgcgcatggagccgcatcaggatgttaaaattacaatttcctggtgttcagctttttatccaccaccatgccgtccgtgagcttcggctggaacttcacgtcgcgacgggccttgaacttcagcacaaacagctcggaggttccctccacaggttccttgtccccgatattgacgaaggtgggatacagggccttggttccgttcgtatgaagcctgtcgttcgtcaggttctccatcttcttcatgttcttaacctccacgcccacgaattccaaatccttgggatcgtacgggagggcaaagctcagggcattcaccagccggaggttccggcccttcacggtcaccttgacggcgtctcccttggcgtacctcttcttatcggcgctgagcaggagctttccgtccaagcgggctttcttctttgcctcctcggcggctttcttcttctcgccgtccccttccttcttatccccttcctcgtccttcctggcggcttcttcctgcggctggtcggcttcgtcttccagctgggtggctaccacggaaatatcgtaagcgtcaataaggccattcttgttgatgtctccgttgctgatgtagccttcaaagtcggaatcgcctttccgcaggcccgtgtagttgatgtaggaggtcaggtcgttccggtcgatcttgccgtcattattgatgtcgcccggcagatagctttccgtgcccggcaccttgaagacgtagatttccctgccggagccgtagtcgcccacgccttccgtgacattcagcttgatgtagcgcgccgtgggggcgtccttgaagttgaagatcttcacgtcgccattcttgtcccactggaacgttccggccttcgtccagttttcccggtccatgctgtaggaaacggagcccttcaggagcgttccgttgccgccgtcctcacgcggaacgtaatggaacttctcaagcttgttgatggtcttcaggtccagaaccaggtcaaacggcacggccttctcgttgtacttcgtgtgccacgcgtccttttccttgaagtcaaagagtttcgtcagggaattgccctggttttccacgctcgtttcaccttcgattcccggaatggcgaactcaagcgggttggccttggtcttcgcgctgatggccgtccaggcggaatggccgtccttgttgacggcgcgtacattgaaggaatagggcgtttccgcctccaaatcctcaaacaggaactccgtccccttgatggtggtatacagcattccgccgaattcgatttcataaaaatcagcgttcggaacagcatcccatgaaggagtcaaggtatatgcggccgcgttttcctccgtcaccctggcattagcgggagcggtcagggcgccggaagagacacggtatttttccgcgggttcaaagcggaagccttccacggaaagcacggtggggacagccgtaatatccgccggggccagcttcaccagcagctgcgggtttttggcaatcaccttcttctcaaaatcgcttcccttggtcgcaaacctgttcaggttgggagcctggtcatagaaatacacgttctcccgggacttgaaatcctccatggaattcgcttccgccaggttgacgctgttttccccgactttggcggaaacgctggacggcttctgcgtcacattgatgcggaactccgtggccttcttcttctggaagccgttgaaatcccccaccgccggatgaacggtgacggtcacgttgttcttgtcgtccgcccgggattcaaccagggtgcggacacccttgccggccctgtattcctccgtcacgccgtcgtcgtcatacgcggtaaaggaagtgctgccgtgcgggtaaagctcgtaaatgcgcaggttaggattgatttccgagacattgttgctcggattggccatgggaatgatcgcgccgttcttgacgaacacgggcagtttccacaggggagcgtcaacgtcattgtaaatcttgccgccttcatacaaatccccggtgaaataatcgatccattgtccttccggcaggtaaatgccgtggcgcacgtcattcccctccttgtccgccctggtttcctggtaaacgggcgccaccagaaaataggggccgtacaggaactggtactgcgtggccttccccagcgtgtagggattggggtattccaggaacatggcccggatcatgggcaggccggaaacggattcctccgcgatgctgtaggcgtacggaagcaattccgacttgagcttgaggtaccaccggttgatggaggtatagggttccccgaaggcgtggggatacttttcattggctccccagccgtccatgttcagctccatgggagtgaaggtcttccactggaaatcgcggacgttcaccagcggattcttcccgccgaaaatgccgtccatgtccgaacagatgttgggctggccggagaggccggagccgatgtaggtgggaatatggaaacggatgtactcccagacgccgcccgtctggtcgcccgaccagatgccggcataacgctgggttccggcccagccgtccagggaaatgatgaacggtcggctgttgttaccgtaataggtcatgatctgggccacgtccgtaatgccgttcaggccgaaggaatagccggcgcccacccaggcgacgtccgtcttcagcacgcgcactccggcgtccctcacctccttcacgatgtcgcgctggagcagggcgctgatttccggcttgggatgcaggtcggactgggtccacaggcctatttccacgccgttcttcctggcgtagtccgccaggttcttcaaattcgcgatattgccgtccagggtatccgtctggccgtagccggctccgtagccatcgttcggcaggagccatcccagcggcatgtcatgggccttgtagcggtccaccacggcgcggccggaaaactggtaattgttcaactccccgttcagggattccttaatgcctccgttatccttctggctttccttgtaccgttttccgtcctcaaacaggatgcccttctcgtcttccttccagtaatcccggttgtaggcgttcaggtggccctggtaaaaggcgaacttgggcagcaggacgggggcgccggtaagctggtagaaatcccccagcaggctgacgggcccgtcgttgaccatgaaaaagacgtccaggtaattttcatcatgcgaaaggctgaccaggttcttctccctggagccgaaatcatactggcccttcttgaaggtatgccacatgacgccgtagccgccggtggaccagtagaagggagtgggggaagccacgccgccatccgtccagctgttctggttctcaatggaaatcaccttccccttgtgggaaaaacggccgttctgcacgccgccgccgtagaaatattcatccggcttcgctttcagggaaaagctggtgctgcccttttcaaaaaggacgggggccgcctgctccaccaccacggaattgtccttcaggttgatgatcttgagaagagaggtctttttgtctatttcaatcctgatcttccctgtggtgatggtgaccacatctccctgctggtccacgtccaggcgggaaaccggcttccgggggttgtccgccaggatgcgggcttccggctccgccttggggtcgcggataatgccgcccttgtcatcccggaaaatccggaaaacgttgtccccgtaaaaatcgaatgtcatccggtggttcttgccaagcagcacttccacggcggcagggttgattttccgggcgccttcaacgggctggacctgttgttccggggtcagttctcccgatgcggcaacggcgagaccggagaaggaaaaagacaatccgaaagccagcaggacggacttccggaacatgccatggtcaattgagtttcccattattgtagtgttttatattattcagccggagcggcgccacggaagggatgcaaacgatcgtttccggccgggcaacgggccgttttccttcgtcatgccgtccagtggcgcagattatcttgctgcaccataccctttgtccgtaatcgccacaaggccaaagacggcagtaacggcgcaccattgctccacacggccataaaatacccgttcacagccacttccctttcaaggatgacctttttaaaagaattacttccgccccatggcgcaggggcacgaaaaagccctgcaagcttttgacttgcagggctttcaaatggttacgggagcaggatttgaacctgcgaccttcaggttatgagcctgacgagctacctggctgctccatcccgcgatttaaagagcatccgtagaggagtgcggaattgttataacctacttccgcagcatgtcaagtactttcaaataaaaattttcatggctgcgaccgtatgacagaggtccggaaacgctttccgggggcggcggaagggaaaggaaaaacgcaggccccttccggcggcttggctcacaacaggtaggagagttgcccggccccggcatgagggaacaagagcggaaaaatccccttccccgcacacggaaaaaaagaaaggattcctcgacaaacattgtcaaatctgtatatcttgaaaggtgcggactgggttccgcgcattaacatcaactagaaagaggtacgacaatgcaaaaggtaaacgtaaacacacccattacgatcacggggcgccacgtggaagtcacagacgcgattcgggaattcgtaacgaaaaagattgaggggatccgcctggacttcccacgcattatggaggttaaagtattgcttgatgtgcaacgcgaccgcaagatttcccaggtgattctgttctgctcggaccacatcaccattgacgcttccacggaagggacggacatgtacgcctgcatcgacgaaacgatcaccaaaatcatgcgccgcatgcgcaagcacaagacgcgcctgatgaaaaatttccgcccccatcaccaggaaaccatccgcaagctggatgaaacggtatatgacgattccgtactggattaccccggagattccaaggaagacccggaacccctcctcattcacagagaaagctacaatctcaagaagctttacaaggaggaagccatcatggaactggaactttccgacaagcccttcgtgctctacaggaatgcgcgacgcgacgtgctccagatcgtgtaccggaggccggacggggactactccattattgaactaggcaccagcctgtgaccgtaaaaaacggttttgaaacaaaccgttttccataacgcatcaaaaagagcaggactcctgaaaccgggggtcctgctcttttctgtaatgccgtgacatggaacaagaaaatctcttgatttctacttgccaccatttacattggtcccagcaaacctccgtggatgcggaggttccagtagttaacaaacactgtatttaattcgaattatgaagaacatcgctatcctcgccatcgccggcgccgcttgcctggtcgcttcttgctcccagcagcagcagcaacagcaaaccaccgctcctgctcccgctccggttgtgcaggccaagggcaagtaagtttgcagcagggcctcgccctgcaacattagcaaatcatccaattaatccgcactcggtgtacgcactgagtgcgtttttatttgcccggaacccggttttcagccgtcatttgccggttcaccgggattttccttaaaaacggcggacgccgtagcaaacgcaggcattccccgcacatgcaggcgtcacccgccatcaagcagagacgtacacaagctccggcctcgttaaacggccttttacattcaggcagccttggaagctccgccgccggaagcgccagcctctttatgggcagcagcggaaccgcttgccttcgcctcctcctgctgaccggactggaacatcctctggatcagcagggggcgtttcctggcccatccgggccagactaggtgatggtccattccgtaggaatgcccttcaggaaaggccttggacacgaacggttcccgccagtcctcctcccatttgcccccttcccggtccttctgggtcagcaccaccagatgcccgcagttcttccaggcgtccaggacgatggaaccctgcaatccccctccggcggcgttcacgtacacgcagctgtgctccctgcccgttccatggtcgcggatggtcagccccacacggaaaaacttcacggggcggcggcgcatgtcacggtacaaatcctgctgcacctgccagcagagccccctgtcacgcaggttggaattgaccaggatgttgttcagccagccgaacagcacaatcctgttattccgggcaatcgccgcggactggactaccgccgtgtccgccagccacttggcttccgccctggcggcgggaagagcggccttctccggcggcagcagccccaggaaagcattcgccaatccggacatctgctgctgcacgtaaggtctctgtatataatcctcagccggaggagtgcagcaggaactccatccgcacaggagggcggcagcaagcaaaagcctgaatgtctgcatggtcggcatggcgcgccaaagctagcagattacacgtaaaaatccagcaaagctttcaaaaatgaccgtccctgccctgacggctcttgccttccccctccctccccggtagaatgccgcccctcttcaccatgctgacgatcaaaaacctcacgaaatcccacgccggacgcaccctgttccgggaaacggaaatgaccattaactggggggaaagggttgccctggtaggccccaacggcgcgggcaagtccaccctgttccgcatgattctgggagaagatacgccggacgaaggctctatcaacatggatgaatacgccatggtgggctatcttccgcaggaggccagcgaaccgaaggatgaaaccgtgctggaaatagccatgggcatcacgccggaaatggaacgcgccatccacgtcatccggacggcggaaaacgccaacaagacggatacgccggagtatgcggaggccattgacacctttaacgccgccaacggctaccagctggaacccaaggccaagaaaatcctcaaggggctggccttccgggaaagcgacttccaccgccccgcgcgggaaatgtccggcggctggatcatgcgcgcgtacctggccaaactgctcgtcctggaaccggacctcctgatgctggacgaacccaccaaccacctggacctcctttccctgctgtggctccagcgctacctgaaaaactaccccggcgccatcctgatgatttcccacgactgggatttcatggacgaactggtggaaagcgtgtacgacatcgacaacgaggaactggtggaataccgcggcaactactcggatttcctgaaacaaagggacatgcgctttgaacagcttcaggccgcctaccgcaaccagcagaaggaaatcgcgcacatccaggaattcatcgaccgcttccgctccatcaactccaaggccgggcaggtccagagccgcatcaagcaactggaaaagatgaagctcatccaaaaacccgtggcccgcaggaaggtgttcaaattcaactttccccagcctccgcgcagcacccagaaggtcattgagctggaaaaaatctgccagtcctacggcgaccacaaggtttatgaaaacctggacctgctggtggaacggggagaacgcaccgtgctggtgggccccaacggcgcgggcaagtccaccctgctgaaaatcctggcgggcatcatccccattgactcgggaaaacgcactcccggcaccaccacgcgcatcggctacttctcccaggcacgcacggaaaacctgaatacggaaaacaccgtcctggaggaaatcatgaagtgcaacgctgaaatccgggaggaggaggcccgatccatcctgggctccttcctgttccggaggctggatgtggaaaaacgcgtcagcgtgctttccggcggagaaaaatcacggctcagcctggtcaagttcctggtggatccgcccaacctcctgctgatggacgaaccgaccacccacctggacctcctgtccgtggaagccctggtgcaggccctgaaacattatgaggggaccctggtcttcatctcccacgacgtgcacttcatccgctccttggcggaaaaaaccctgcacgtgaaccggggaaccatcaccacctatgcgggcgggtacgattattacctggaaaagtcaggcattctggacgacgaaaaaggcggcatcacggcggaataaccgtcctccccttttcagcttcccttttctccttgccttgggtctcatcctgccttagaaagacaggatgaagactttccttgtccccgtcctggcctccgccctggtggccggagttccgctcgcctttggtgaaacggccaccccggcggcttcacccgcgccggcagcccctgcggaaaaaactccgtcagcggattccctccttaaccaggccttttccgtagccattgatgtccagcaaacgctggcggcagtacaggacaaggaaagcggggacaaggccgtcaagaagctgcagggcattcagaaggacattcagcgcctcatggacttacgggaaaaattgagcgaggcggaaaaggaaaaaatggacgccctgtcagaaaaaatggaggaacggatggacatgctgagcgaacgctgtgaaaaggagggccagcggctgctggaagcccgctattacggctccgccgccctgaaggacatcctggaaaactcggatgaattcagcgatctcgtcgagccggatgaagatgtggcggaaccggaggaggacaatacgccagccccagccggaaacgttctttctcccaaccctgaagacctcctcccgccgaattgaccggaaaaagatgcccatacaggaaaagccgtggagaacaaccgccctttcccgcttccatttcaagcttgccggaaccgtgaaaaacgggtttactgtgggcagcatgcaaaagttagcaggtaaaacagccatcgttaccggggcaggccgcggcatcggcaatgccatcgcccgccgcttcgcttcagaaggagccagggtcatcctgatcagccgcagtccttccagctgcgggggagccgcagaagaaatcaacaaggaatttccggactcctgcaaggcctacccctgcgacgtggcggattacgccgccgttcaggaaaccgtttccgccatcctgaaggactttccgcagatcgacattctggtgaacaacgccggcattacccgtgactccctgatgcttcgcatgaaggaggaagactgggacgccgtcatggataccaacctgaaaagcgcgttcaatacggtgaaagccctgcagcgcgtgctgatgaagtcccctgccggacgcatcattaacatgagttccgtcatcggcctcgtgggcaacatcgggcaggccaactacgccgcctccaaggcgggcctcatcggtttcaccaaatccctggccctggaattcgccccgcgcaaggtgacgtgcaacgccattgcccccggcttcatttccacggaaatgtccaatgccattccggacaacctcaaggaagaaatcgtcaagaaaattcccctgaaggaacagggctccgtggaagacatcgccgccctgacggccttcctcgcctctgacgatgcccgttacatcaccggacaggtcatcgcctgtgacgggggcatgacgatgtaaggctttcccggtcttcaccatcccatgcgcggcattttccttgtttcctgctttctgggaggaagcgccctgctggccgggtgccgggacgacggctccccccgcccggccacggaggatgccgcgcgcattaccggcgcgcgccagtggggagagagccgctccgcactgcaaaaacgggagctggaccgcgccgccggacccgccctccctattccggacgatctgcccgcccgggagctggtcggcaccacacgccaaatccaccagctcattgaagcctccgggatcccctcacgttttgaatcctatacggaagcggtgcccgcagcgggggcttccctgcgcatggccgccattcccggcggaacctttctcatggggagccctgcggaggagccgggccgcaagccggacgaaggtccgcggcatgaagtgaacgtttctccgttctggatctcggaaacggaaattccctgggaactctatacggccttcatggaaaacggacgcccgcgcgccaaggacggccagcttctggaggaacagccggacgatgaactgtgggactccgtcacgcagcccacagccccctacaccgccatgaacctgggcatgggccacggctatgaacacggcctgccggccatctccatgtcccatcacgccgccagcaaattctgcgaatggctgagcgcccagaccgggcattactaccgcctgccgacggaagcggaatgggaatacgcctgccgtgccgggaaccccggagcctactcttacggaaacggggaggaagccctggaccagtacgcctggtactgggacaattccaacgaccgctaccaaaaaacaggctccaaaaagccgaataagtggggcctccgggacatgcacggaaacgtggcggaatgggttctggattcctaccttccggatgcctacggcaagcgggacggccagcccgccaaagaccccctggtcatcgcgcccaaggctccccacgtcgttcgcggcggctcctgggaagacgatccggaccgcctgcggagcgccgcgcgccgcgccagctcccccgcctggaatcggcaggatccccagaaccccaaaagcatctggtacctgacggacggcggcatgatcggcttccgcgtggtacgccccatgaacattccggacgtcatcaccatgcaccgcctctggaacttctccaagggggagccgtgaagagagaccttctatgaccatcaaattaagaacggaacagcccgcagactatgccgaaacggaacatgtcacgcgggaagcgttctggaaccattattcccccggctgcaatgagcattacctgctccatatcatgcgcggcagcccctccttcatcccggaactggatgtggtcgccgtccacggcggccgcattgtcgggaacatcgtttatgcaaaatccgtcatcaggacagatggcgggaaggaatgcgaggtgctgggcatggggcccatttccgttcttccggaataccagcgccggggaattggacggcaaatgatcgaacataccaaaatgaaggcccgtgaaatggggttccgggccattctgttgtacggcgacccggactactattcacgccacgggttcgtggccgcggaaacgctgggcatcagaacggcggatgacatgtacgcggcagccctccaggtctgcgaactgcaggaagaggccttatccggcatgaaaggccgttacgtggaagctgccgtgtatgatcttgatgaaaagtgcgccgccgaatttgacctgcattttccggcaaaggagatggtctccggaactccgtcgcaaaagcgctttgagaaaattgccgccatgcggagaaaagcggatacgggaacctgaaaccggaaatccttgcaccctccggatgtcatgaatcccgcatccggatacgttacattcgcagcccttttttccaggggtaaaaaataagggccgttccatgagaacagcccttatccgtcaaaagcctgtcatcaagggctcaggccctgcggcggcgcatcatcagggcagccagccccagcaggctcagcgtggccgtagcgggttccggaaccacttccccgcggatctccgtaaaaatgggggataattgagcgaaggtattggttccattggctcctgtaatgacaatggaatcatcgggcgctcccgcgctgtcatgatggccgcgaatgccgggagcagtcaatccgttgctgatggttaccgtatctccatccgtggaagaagtaggcgcgcctgtccctcccgcagcatacaagtacgtttttgacgtatctccgttgatcatatccatcacggcctggcttacggtcaggtagcggtacgtcgtgccggcgtcaagaatcagggaagaaccgtccacagctgagaaattgaacgtcagattgaccccgttgccggaggttcccatattggtgctcaggccgatgaccgaattgtcggaagcgttcagcaccagaaaaccgtaagtgacgttagcgcccgtattgccgctgggcccgcgcagagtaaaactgtccagccggatatctccggacagggaggcgggagagccggaaccagagacgggggccagggcggaagaatccagccccagatagaacccatgaatggtgctgttgtaattgtctgctccaggagtgtaataattaaaaacagtcgcggcttctgaggaaacggcgaaggttccaagtgcggctaaaattgttagtgttttcttcatgtctattgtcctgttccttttaggctttgtagcggatttggaatccggatttggaatccggcaagtatgaaaaaagaggccaaagcaatagggaaatcaatgaataacaaagaccgctccaccacgttaataaaagaaccagaggcatcaaaaaatcattatttccaacgaattatgaatgcaatatattaacctttaatatttttaattgtttgcggattccaaatccgttatttagttatttacgcagaagccctgcttgtgcatgcgcatgcgtaccgttcaccccagaacattgattatgaagaaaatactatacgccttaatgcttgcagccggcatgagcctgagcgccaccgcggcgaccacgcttctggacagctccatcgtagggtattccgacttcgcctcccgtctggcggatttcggcacccagaaggattccgttgccatcacgaccgatggcggcaatctggtgttgtccggcacgacctttagccagcccgtttccgggggaaacacgcgcaacaacatgaccgtgaccatggttctggatctgtccaaaatcaacactccggaagcctataccgccctgtttaacgccaagggaggaagtaccagctggggtgcgggcctgaatacggaccgtactctccagggattatggaacaatgccgcatacagcggcggccctaccacctccgctctgggcacggaaggcaccctgaccatttccgtggtcaccggggaattcggcacccgcatctacctgggcgacagtgccacgtaccatactgccagcggcctgaaattcggcggcgtggatatcacccagattctgattgacgcgggactggctgacgccgttgaacagctctacgttcatgactccgctctttcccaggagcagatcggccagttgatgagtgaaatcgccagcgttccggaacccgcaacggcaaccctgggcctgctgggactggccgcgctgatgatgcgccgccgcagggcataaaaccgcaccggttctccgtttttctttcagggctgcctcgcgactccgtgaggcggccctttctgcatccgcacaacgcgcctaccctaccggaggcagatacttcttccttccctcccctgaaaaacgatgttcaaggcagcctccggctgaaacgcttcacggggcgtccgtgtcaccccaccttccgcacaaatccttttcccccacgccggaacagccggaaccggatacggaaaaaaccgtcttccctctgcgggcggcgcgcctcatccttgcagccgtcctacccctgcgcagaccggccattcaggctctgccgggagcagcacacccccacgttccgggaagggcgcctgtttcaagctgctccttccgcctgaaagggggaaacgtttttaacctgcataccccacatcctgatcatgaatctccagaaacagcaattgctcctgcgccttttccggtatttcaaaagcaaaaaaggagaaccgcggtttttcaacaagcggaatatatggctgctcgccattgccgccgcctacatcctgactcctgacgaattcctgtttgacggaatcggcaagctgggtctcctggatgacgccgcagtcatcctgggagccgtcttcaccgtcttctttccggacggggactagcggcccgcggccagggatgcggctagacggacgataccttccggaacttcggggactgtcccatgaacgcctccggattgcctaaaagaagcttctccgcctcctgccgggaaaaaccgcgcttgtaaagctcgcaggccagggccgtaagcgccagggggtcggaatctccccagtccgccgcggaattggcccagacgcgatccattccgtacagctccagaatatccgccgcccgcttggggttcagcttgctggtggggtaaagggtcagcccggcccagtagccggcctccttcaccagcgggaaggtgtgctcctcgcaatggtccaccagcacccggccggggtccagctccggacggtttttcagggcggaaagaatcattctggtccctttcagcttgtcttccagatggggggtgtgaatcaggacaagctggttcaggcgtattgccatgtccagatgctcttcaaaaatagtcatttcatgggaggtattccggttcagcccgatctccccgatgccgaggacattcggacggtcaatgaattccgggatgagcttcatcacttcccgggcaaaggccacgtcctgcgcctccttagggttgatgcacagccacgtgtaatggtccatgccgaacttggccgccctggccggttcgcattccgtaagctgcacgaagtaatcccggaaaccgtccgcggaggaacggtcatagccggcccagaacgccggttctcctaccgccaggcagcctgcctgcgccatggcccggtattcgtccgtggtgcggcacaccatgtgtatatgaggttctatgaaagccatgattcttatttgctgaagttcggggctccgcaggccgccttggcggcggcggtttccggcacggcgtcatcccggtaggaaagggcttccagaatggcccggacgcgcccggcgccggaggcggacaggagggggagcgcttccatcagggcgcggtagcggaaatccgcctccccttccccccggtccacccggtccagaaacgcggctatgtccagcaccccggcgcgcgccgccgcaaaatcggcgtccaatacctcttttttactccttttcatacgcagacgatacgcccatgcggaaagcctcgtcaagccggaacaggtaacaaaattataactattccaaactagtgaactgcaacgtcttttcacgtcttttcaaaaatccaaaaagcgccgggaattcaagaagaggcttgccatccgggtttgaaccgggcatcctgtggagacgcatttatttcattagagcgcctatgaatgcactagtaaaaaccatatgtacattcgtgacatcctccatcggccgcaaaatcattgtggctctgacggggttatgtttggtcttgttcctcgcgggacacctggcaggcaaccttcttatcttcggaggccctgaatggatcaacacctacgcccacggcctgcactccatgccggaagcagccctctggggcatccgcgcggggcttgcggtgatcttcatcatccacgtctggctgaccatccagctgaagctggaaaaccacgccgcccgcgaaccctacgtgttcaagaacacgatcaaggcaacgctctcctcccgctacatgatctacaccggcctgactatcctggtgttcctgatctaccacctgtaccagtacaccctgcgcgtgggttacgatcccgcccagtacaccgccttcatttccgacggcaaggtggaaacctttgacgtgtacaagatgatcgtggccggattctccaacgtatggtgctccgccttctacatcctggccatcctgatgctgttcagccacctgcgccacggcgtgcagtccatcttccagacggtgggcgctgattcccgcaaaatccggcccttctacaactttgtcgccatcgcctacggcgcagtgatctgcctgggcttcatttccgtgccggtctcggttcttctgggtatcatcaaataaccatcaactcctctcaaagtcatgattaattttcccgtaagcgactggatgccggatgccaagattccttccggcccgattcaggacaaatggtccaagtacaagcttgagtccaaactgatcaacccgaacaacaagcgcaagtacaccgtgctcgtggtagggtccggcctggccggcgcctccgccgccgccacgcttgccgagcttggctacaacgtcaagtgcttctgctaccaggacagcccccgccgcgcccactccattgcggcccagggcggcatcaacgcggccaagaactaccagaacgacggcgactccgtctaccgcctgttctatgataccgtgaagggcggcgacttccgcgcccgtgaagccaacgtctaccgcctggcggaagtttcctccaacatcattgaccagtgcgtggcccagggcgttcccttcggccgtgaatacggcggcctgctggacaaccgctccttcggcggcgcccagctcaagcgcaccttctacgcacgcggccagacgggccagcagctcctgctgggcgcctaccaggccctggaaaaggaagtggccaagggacacattgaaatgttctcccgccatgaaatgatggatctggtgctggtggacggcgaagccaggggcattgtcacccgcaacctgatcaccggcgaaatccagtcctacgcaggggacaccgtcctgctctgcacgggcggctacggcaacgtcttcttcctgtccaccaacgcgatgggttgcaacgtcaccgccgcctacaaggcctacaagcgcggcgccttcttcgccaacccctgcttcacgcagattcaccccacctgcattccggtcaagggcgactaccagtccaagctgacgctgatgtcggaatccctccgcaacagcggccgcatctgggtgcccaagtcccgtgaaaccgcggaaaaaatccgcaagaaggaaatcaagccttccgacgttcccgaagaagaacgcgactactacctggaacgcaagtacccctccttcggcaacctggctccgcgcgacatctcctcccgcgccgccaaggaagcctgcgacgacggccgcggcgtagccatcaccggcaagggcgtcttcctggactttgcggatgaaatcaagcgcatgggccgcgaatggattgacggccagtacggcaacctgttcgacatgtacgaggaaatcacggacgacgatccccatgaaacgcccatgatgatctatcccgcctcccactacacgatgggcggcctgtgggtggactacaacctcatgtccagcgtgaagggcctgcacgtcctcggtgaagccaacttctccgaccacggcgccaaccgcctgggcgcttccgccctgatgcagggcctgtccgacggctacttcgtcattcccgccacgctgcccgcctacctcacgaccatcaagcccggctccgtcaccaccgcctccccggaattcaaggccgcggaagacgaagtgaaggaacgcatcaacaagctcctgaacgtgaagggcaccaagacggtggactccttccaccgggaactgggcctcatcatgtgggaagactgcggcatggcccgtacggaagaaagcctcatgaacgccatcgaacgcattccccagctccgcaaggaattctgggaaaacgtgcgtgtgaccggaacggcggacggcatcaatgcggaactggaaaaagcctgccgcgtggcggacttcctggaattcgcccagctgctctgctatgacgccctgaaccgccaggaatcctgcggcgcccacttccgcgtggaataccagctgccggacggcgaagccaagcgcaacgacgaagaatacgcctacgtggccgcctgggaatacaccggcgtggacagcctgcccattcttcacaaggaaccgctgaccttcgagaacgtgcaccttgccatccgcagctacaagtaaagatagccaatacattaacacttaaaagaaagattataacatggctaaaacactcaatctcactctcaaggtctggcgccaggaaaaccgggaagccaagggccgcattgagacctatgccgccaaggacattccggtggacgcctccttcctggaaatgctggacatcgtcaatgaaggcctggtcaaggaaggcaaggatccgatccactttgaccacgactgccgggaaggcatctgcggcatgtgctccctgaccatcaacggcatcccacacggcccggaacgccaggtgaccacctgccagctccacatgcgcaagttcaaggacggcgataccatctggatcgaacccttccgcgcgaaagccttcccgatcctgcgggacctgatggtggaccgctccgccctggaccgcatcatcgcctccggcggctacatcgacgtgcgcaccggctccgcgccgaacgccaacaacatcgccgtggaaaaagtgaaggcggaagccgcctttgacgctgccgcctgcatcggctgcggcgcctgcgtggcctcctgcaaaaatgcctctgccatgctgttcacgtccgccaagatcgcccacctcaatctgctgccgcagggccagccggaacgcaccaagcgcgtcctggccatgatgaagcagatggaagcggaaggcttcggcaactgcacgaaccagtatgaatgtgaggccgcctgcccgaagggcatcagcgtggacaacattgcccgcctcaaccgcgacttcatcgtggccaacaccaaggaaggcctcgcctactaaggcgggcccccttttcaaaacgttaatcagaactcccggcggcgctcgtgcccgccgggagttttttattgctccgggaaacgccgcaaacctgcgcaacagacagaaaccggggcaagtgaagcattcccgctttccgcaagacggcgctgcaaccaaccataaatggacggaagaataggcccttaaatggctgaaaagatcaggaaggggaaagaaaagggtgaagtgtccccaatgggacaaatgcccctttcaattattcaagacggcccctttcaggcatttatttcttcaattgccccgtggcccttccattctggagcggaagcctgtattttcaagcttcctcaaccaatttcaacccttttcaagtattcatggctggtcacagcgcgccttatacgcgccaaacgcaaaagcggtacggcttccctttattggccctgtcacttccggatggaggcagtccccattccgcaaggcctctccactctccactctccactctcacccctcccgtcactccctgttacgggaatccatgaaaatggtcaccggaccgtcgttgaccagggaaacctgcatatccgcgccaattcgccgctttccaccctgccttccagcaaggacgccagttccctcttgaacagttcatacaggggaacggcctgctccggccttgcagcgcggatgaaggagggcctgttgcccttcctggtggaggcgtgcagcgtaaactggctcaccaccagaacactcccccccatttccttcacggaaagattcatcttcccctccgcatcggaaaaaatacgcatgtccgccgcctttttggcaagccagcgcacatcctcttccgtatccgcctcttcaatgcccgccagaatcatcaggcccggacccgtgcttcccgcacagacgccgccgatgtgcacggcagcctccgtgacgcgttgaatgaccagcctcactgcgccgctcccttctccctcagaatggtcaccttcgtgcccgcacgggtcagcatggccagctcattgcagtcctgccggctcaaataaaagcccggtgaacggggagctccgcgggaaacgtcaatgacatagccccccgccgccagcaccagcgttttgtccgcagagggaaactgcttgctgtaaatggaaacaggggcctgctcgtccttgacggacgtctccaaattcttttttcctccgtccttcatggagagaatgggatagcccttcacaaaattcgtcccgtcgtacaggcagacttccttctccggcacgttcaccactacatgaaaatccaggggacggtacttgagcacatcccccgcatgcagaacgggaatgtccatcaggccgttgaggtgcatcaccatggcctgggagcagtccagcttcctgaccatgcgtatccaggaatcccctctccgtacggtgtacttcttcacgtccggcccgttggggtccagcaattgccggatgcgcaggctgccgatgagatccttcgcttccctccccaccacgccgccctgctccaccaggggctgcaacagctccagagcctgcggcaggctcccccggtccatcaggcgccgggcttccgccagggcttccggacggcgcggccagagggaatagttttccccgtccgcaaaaactccctgggcgcagcaggccgccgccagaaggctaaagaagacccttgcgcttgaagtcaaagatattgatctcatgggatttttgtatcatttccacggtgaatttcaagagggagacctcccatgcgtcatccaccccttcaatgagggccatgaacgtatcctctccgttgcgcacctggtccagcagacggccgcgcacggcatcaaggggttcatgcagaatttcctcattcacttccgacctcttgaacctgaagccgtattccagcagcgtcaaaaagcccggtccgttcttggaaagccagtcaaagaagcgcttggcctctccggaaaagccctccgtactgacttcattgtaaacggaagggcgtatgatcttcggcttttccgcctccacccagccgctgcgcacgcgcaccacgcccgcttcatccatcagctcgctgaggagaaggaaattgaacctggtatcgccaaaggtatcaatgcgacggtccggttcataaaccacccgggtcatttccgccgcatagcggatatcgtcacgggagaaggagggcagatcactcatggaagaagaagccgggagctttccatgaaaaagcggcttccttgccttggacagggaagccgcttttgtaataaaggatttttagcagttcaacttaaccctgaaccttttcgatgtaagcaacgacatcggcaacggactgaagcttttcagcttcttcgtcgggtacttcgatgtcaaagttttcttcgaaagccatcacgagttcaacggtatccagcgaatcagcaccgagatcctcgatgaatttcgcatcagcagtcactttatcggattcaacgccaagttgctcaacgatgatacttcttactttttcttcgatgctgttgtcagacatgatatttattgttaaggttcatggatactacatggggtatacgcaatttgcaacacctatttatgagtttttacgtgtcatccggccccctcgccggaagtaacaagctcccggccaggccgttgcccgttcttcaaagattaagcacggcagctatccgcaaaccgttcagcgtaatatccgggtccacatggtcgatgcgctccacgcccctggcgatcagcgcggcgtccccgcccgtagccaccacggccgggcgcgtgcccagctcctcctccagccgggccaggatttccttcaccagcccccggtagccgtacacggcgccggactgcatggcctccaccgtactggttccgatggcatgggcgggctcctgcgggtcgatggcgggaagaagggcggtattgcgctccaggtaatcccccatgctggcaagccctggagcaatgacgccgcccagataggtgcattgggggccgatcacgtcaaaggtcaccgcagtgccgaagtccaccacgacgcacgggcagccgtaataggccgcggcgcccacggcgttcgccagcctgtcggctcctatctggcgcgggtgggggtagtcgatgcccacgcccagccgggaatcgcaggaaaggaaatggcacggcttgcctatccagtttttcagcacctcccccacgcgcggcactacggagcacaccacggcggcatcgtaatggacgccggccagcacttcatccagccgttcctcgctcacctcccgggtgggaatcatgtaccgttccggcagcagggcgtccggcgtggaaagcacgaacttggtgcgcgtattggaattgtcgatcagcagataagtcacggaaatcagttagtacgttcctccgccagtttcaagaccaaatccgctatcttgccgcttcccccggtcatctccgccttcaccaaattttcatgcatgcgcctccacggcgcaccgccttcctctaccatctcccgcaaggcggcagccagggcacgggcgtccggcacatggcggccgccgcccagtttttccagcaggcgggcgttgccctcctcctggcccggaagaagaaagtttaccagcatgggccgtgcagacgccagcacctcatgcacggtggcccctcccgctttcccaaccaccacatggctggcggcgagatagaagggcacgcggcgcgtccagccgcgcacggccagcctatgcccgtatctggcgcgcaaatcccggatatgggggtaaatgcgcctgaaccggcggcccaggatgcaggtgacgcgtatggaggggtccgcctccagcatggcctccagctccgcgcgcgcatgccgtgcggaacgctgggcaaaataaagcacccggaacggctcgcccgccttccaggaaacggggcactcccgcgccagcgcccccaggccgggattgacggggaatcccgtgacgcgcaccctgtccggaggaagccccttctccaccatgatttcccgcgtccaggggtccgtcacggcccacaggggggactccgaacacagccaggacttattgatgacgaaggaatccgtcacaacggtcaagtacggcaccgcgttccccgtgcgggccgccagggaatccagcatgtagggatacaccatgtacgtgcagaccacggcgtccggcttccaatcccgcagcagccgttccagaaaacgctccacgggagcgagccccttgacgggtttttccgccaggttgcgcttgtcgctcacctcgtacatcagcttccagaggcggggcaggcgggaaataatccacaggtaggcggcgcgcgtcaggcggaacatccggggcatcgcctccgcgcacaggtccgtcacgcggacttccgcgcgccctgcgagggcatcccgcacacccctggcggcggaattgtgcccttccccgtatcccgcagtcacgatcagaattcgcggcagccttctcttctccatgggacaggatataccagtattccagtcaatcggaaagaacttcttgcaggaagacgggcacgcccgcagagcttcttccggcagatccggcgcagcgcctgccttgacggcaggggccggaagagccttgttcccggcggggcagccagcgggaaacacggaaaaacaccttcccgcggactgcgtgaaaacgccctgccgggaatgaaggcctcccggccttcatcattggatccaatccggaatgaatcgaagaggttttgtctgcaagggccgaaaggcccctgcggcccgcggacggaaaaggaccgcaaaacagcatttgcacaccattattcccctcccgaatccggatttaacattgacctgcgcaggccgtcagggcaagctttcagccatgcgcatcgtcttcatgggcacaggcgacattgccattcccgccttccgcagcctggtccgtaactcggacctggtaggcctggtcacgcagcctgaccgccccgtcggcaggcaccaggtgcttacggctcccgctatcaagaacattgccagagaagcgggcattcccgtgctccagccgcactccctgcggactccggacgcgctgatcaaccttaaaaggctgaatccggacctgatcgcggtcatggcgtacgggcagatcctgagccaggaggtgattgacatggcgcccatgggctgcatcaacgcccatgcctccctgctgccgcgccaccgcggagcggcctgcatccagtccgccatcaagtccggcgattccgagacgggaatcaccatcatgcacatcgtcaaaaagctggacgccggggacatcatcgcccagatcagcaccccgctggaaggcacggaaaccggcggctccctgcacgacaagctggcccagatgacgccggacgtattgctcccagccatccacgccattgaaaagggaaccgccacacgcgtcccccagaaggaattcctggcgacgtacgctcccaagctcctgcgtgcggacggaaagattgactggacgcgccccgcagaggaaatcggacgcatgatccgggcgtatgacccgtggcccggcaccttcaccaattactggaaccgcaagaagcgtatccgcaacatgaaaatctttcccggcttctccatcgttccggaggcggaagggaaaccgggccaggtgctttccgccggagaacaggggctgctgatcgcctgcggaagcggcggcctgctggtgacgaacgtccagcttgaaggaagtacgcgcatgaacatctcccagctcatcgccggccacccgaatttgaaagacatccattttgacgtgtaaatggccaagtccttttccatggagagcctgaacgcggcccagaggaaggccgtacagaccctgcaggggcccgtgctgatcctagccggggccggaacgggcaagacgcgcaccgtcacctgccgcatcgcccacatggtggaccgcggcatcagccccaaaagcatcctggccgtgacgttcacgaacaaggccgccctggaaatgagggagcgcgtaggccagatggtggaacggaaggcggcgcgccagatcatggtgagcaccttccattccctctgcgtgcgcatcctgcgggaggacataggccggctggggtacaagaccaatttcaccatttacagcggttccgagcagagcggactgatccggcgcctgatcgtacgccacggcggcatcacggaaaaaatcacccccaaggacgtgctgtccgccatgagccggatgaagaatagcggcctgggcctggattccattgaagacaacctgacggccaacatcgccgcctcctaccagcgggagcttcaggcgcagaattccgtggattttgacgacctgctgattctggcggacaagctgctgaaggagcaccgggacgtcagggaggcgtggcagcagcgcttccgctatatcaccgtggatgagttccaggataccaacagcctccagatgagcctgctgggacatttggtggggcccgcgcacaacgtctgcgtggtaggcgacgacgaccagtccatctacggctggcgcggcgcccagatcagcaacatcctggagttcgaacgctttttcccgaaccccgccgtcatcaagctggaggagaattaccgctgcaccgcccccatcctggacgcggccaacgccctgatccgccacaacctgggccggagggacaagacgctgcgcgcccacaagggcggcggagaagcagtgaggctgatttccatgcccggagacgcggaggaagcggagttcatcatcacggacattgaaaacgtccgcaggcaggaggagcgcccctgggaggatttcgccatcctgttccgggccaacacccagagccgcattattgaacagacgctccgggagcacaagattccctaccgcatggtgggggcgcagagcttctttgaccgcaaggaggtgaaggacctcatttcctacctggcgaccatcgaaaacccgcaggctgacgaatacctgctgcgcatcctcaatacgcccccgcgcggcatcagcgagctgaccagccacctggccatcgactggagccgggaacacggcaacagcgtatgggccgccctgcaggacgacgaattcctggccacactctccacccgcgcccgcaacagcgtgctggagttcaacgacctgattgccagatacatcgaccttttccaggataaggagaccgattttggagacgccctggaacagctcattgaagaaaccggattcagcgagtacgtcacgcgcctgtgcaagacggaggcagaaatccagaagcggctggtatccatcggggacgtgaaagcctccctccgcaacttctggcagcccggaaaaaccctccgggactatctggcccaggtcactctggacaaggaggacaatgacgacgacgtggagaacaagcccggcgtgtgcctgattaccatgcacgccgccaaggggctggaattcccggtggtgtacctcgtggggctggaagaaggcatcctgcctcacaagcgttccctggaagacggcaactgtgacgaagaacgccgcctgctttacgtgggcatcacgcgcgcccaggaaaaactcatgctgacctattgcgccacgcgcctgcgctacggggaccgcatgccctgccagcgttcctccttcctgagtgaaattcctccccacctgatggattattccaaatgggaggatctcatgaatgcggaagcgacggaagaggagtccggaaactttttcgactccctccgcagcatgcttctggaagatgaataaaagacagccgggtgtttcaccggctgcctttaaaccatgagttattttttaccgggacaggtttaacgggaacggcggcggcgcatcagcagggccgccagtccaaaaaggctgagggaagccgtggccggttccggaacagccaggctcggcattccgtccctgactgccagggcggacattccgtagtcgccggccagggaaagcaggctgtcggagaagtccatcgtgaccgaagagctgggattgaaagaagaattggtttcaaactgccaggtcagcatgaacgtaccgctggaaagcagggtagccaggctaccgccgctgatatgaagcagatccactacctgcccgttggagccggccagatagatattcttgacgttgataccggtaccggtcaggttcacggggctgttcgttccccacgtggccacatttgccaagccgcttatggtgaacacggaagacatcgtataggaactattggcctgaaatccggtgacgctaacgtcaccgggggcgacgaggcctcccaccccaagaaccagggtctcattccacccgcgggtggtcttggcggcatccaggtcatagccgtaagcctgcttccacatgttcaggccgccggtcccgatcgtgtgcgtaccgtacatgttgctgttggtagcctgcactcctccgagcagaccgccggagatgttatacgtaacctgaatcgcggacgccgtaccgtccgtagctttcatggaattgccggtcgtgcggttgccacttgtcattgtaccgcttgccaaatcccacggagcggaataggtgttcgaactttcgccgaacgaaaccattgtcgttttcccccatcccggtgcggagcacaggagagcaaggagcgacattatacataaacgcattttcatatcatcaacagagatggagtttttccgtttgcttatatcctgttgacgtctttcctttgattgacgatcaacaagggatttgactcgaacccgcctcccaggttcacacgatagatgaaaaaaaagtcccattttttcaatttcacacgcaattcgtttagatacaacaagaaagcatttgtcatccgttttgacatccttttccgctccaagggcttcagggcaggttcatcctcctttccgggcacaaaaaatccccccggtccggaccggagggattgaaaaacacaggcttaacgcccctgcccgttaccagaagatgatgtacagggcaaccgtcgcggcaatcacgaaccagccgaatatcttggcgcgtgaagaggactggagggccaccacgcctctatcgggcagcacgatggactgtccgccgcgggcggcgttcactgccgtgaagatgaagccgatgatcaccaccgtaataaagcacacggccatgcggttcaggaaggccatttccggctgccatatcttcaaggctccgtacaggagggcattgatgacaatacccagccagccgaagatgcgcgggcacttgggcacgaagaagccgaagaggaacacacacagggcgccaggactcaggaagccctggaattcctggatgaagttgaagattcctccgaaagccgggctgtccaggaacggcgcaatgcacagcgcaatcacggcgcacaccagcaggccgatcttgccaacagtaacaagctccgtgggcttcgcgttcctgcgcagcttgttgtaaatgtccatcgtaaagatggtggaggcggagttcagcatggacgccagggaagacaccaccgcgccgaagagtgcggcaagcacaaaccacgtccagcccgtgccgggcagcagcttcctgatcagcgtgccgaaggcggagtcatagtcaaagcccaccagggtatccgtcaaataatagttgtccgagttgtctacggccggcttgatgatcttgctgttaagcgaggcgatcttttccacgaacggagcgcgttccgccagagtagtctggtcattggcggcatccgccttcagatcggcgcaggcctgtttcaattcggccatgacctcgccgccaaccttcatcacctccgcgttatgcagggcgtgggcgcagccttcttccacgttttccaccaggaagctgtccgtaagcttgtagatgacgggacggcccttgacggcctcgggattttccgccttgcggatttccgccgcatacttcacttctgcctgttccttcaggtcattgcggtacaggttgtaggccagaatgccgggaaccaccaccacaaacggaatgatgagcttgaggaacgcggcgaacacgatgcccatctggccttccgccagagacttggaagccagcgtacgctgcatgatgtactggttcaggccccagtagaagaagttgggaatccagagacccaggcaaagggccgtccacgggatttccgcatcgtcagcagggcggatcatgtggagcttgccgcccacggtattcacgccgctggccgcatcgccggagttgagttcaaagaagcgcgtcaccccgtgccagaggctgtccgagggatttcccagggaagcgaccgttgcgccggaattggcggcggcagactgcaccagatggttcgggtccgcaccgctcagcgccatcagggcaaaatatgccaccacgccgccgcctacaatcagggcggcgccccagaacaggtccgtccaggcgcaggctttcaaaccgcccacgaacacgtataccgtagcacagaaggcaatgatgatgcagcccacggtgatgttgccgaagtcaatgcccatggcagtgtaccccgtaaagaacacggagataaccttggcgccggcgtaaatcacgcccgcagtcggcacgcccaccagaatcagcagcgtagcaatggccatgagggaacgcgccagcgtattatagcggtattccaggaattcgggaatggtgtatacaccgcccttcagcagcttgggaaggaagcagaaggccacgactaccagcgtgatggcggccagccattcatacccggcgatcgccatgccaacccagttggcggccttgccggacatccccacaaactgttccgtggaaatgttggcggcgatcagggagaagcctaccagccaccaggtcaggccgcggccggccaggaagtagtctgaagcgcctttggtcttcttttcttcctccgtttcctcaggatcacggcttttccagatgcccagggcgattacgcccaccacaaccacacagaacaggatgacttccgttatggaaaggggggctgtcttgggttcagcggaggcttccggagctgtctgggaggcgacggcggcgggggccgccggctgaagttccgcagccggctgtgcttccgcagcgggggtcacggccggagcggccagggcgggctgcgcatcagccgccggtgcgggcacggagccctcctgggcggaaacgccccacgtcatcagggccagagccccgaatatggttgctagtgttctcataatcagtatggattaagcttggtacaggacacgggcgccttctccggcacaggtcacaaggtaagtggtttcaatgcccgtttcctgacagtagccgtccagaagctcgcgggccaccttgtccacgtcttccgtcttcaccagggccacgatgcacccgccgaagccgccgcccgtcatgcgcgcgccgtaaatggaggatgcggaaggaatgcggtcgcagagggaaaccagggtatccacttccgcgcaggaaacttcataatcgtcacgcagggaggcgtggctgccgcgcatggctacgccggcttcatcccagtcgccgcgggcaagggcgttcgcaaaggcgtttacgcgggcgttttcaccaatgacgtggcgggcgcggcggtagcgcacgtcgccaagctgttccttgaaggattccagcagctccagcgtggcttcccgcagggagggcacgcccatgatggcggaggcttcctcgcactgcttgcggcgctggccgtaggctccgtccgccagggagtgcttcacggcgctgtccagcaccagcacggagacggactcgttgttcatcggcaccagttcatattccagcgtggcgcagtccagcttgagggccatgcccttctttccgttggcggaaataaactggtccatgataccgcagggaacgttcacgaattcatgttccacggcctggccgatcaaggccacttccttgggatcaatttcaaccccggcgaaggcggcaagcgccgtgcagacggaaacttcaagagcggcgctggaggaaaggccgccgccgcggggcacgttgctgtcaatcagcatgtccaccggcccgatttctatgccgcgcctgtgcaggttggccaggacgccgcggacgtagttggaccagaacggatcgccgggaaccagggcgtcctccaccgcaatttcatggatctggtcgcccagggagccgcagaagcggtgcttgcccacgggggagggagccacagccacaacacagtggttatcaagcgccatgggcatcacaaagccattattataatccgtgtgctcaccgatgaggttcacacgccccggcgccgcagccacgtgagtcggctcctgaccgaaatactcgatgaaatacggagtcaccgtttctttagagatttctcgctgaactaaatccatagtgggctgattctgccccatccctttccgcacctcaaggttaaagtctccgccccgcaacaattttcttcattttcaaccaaatattccaagcacccgttgccagccgtccgcattcctttcaaaaacgggcctgcaccggcctgccacgaggcgccagccccctccaaatcccgttgcaaacgacggcctccggcttgcatttcagggatgcggggaaaggcggagcgtcacttcgccccgcgggcgaacagcaccgccgggacagttttcaggagcagtttgacatccagccacagggaccagttgtcaatgtactccatgtccagctccaccagtttttcaaattcccggatgttgctgcgcccggctatctgccagtaccccgtcaccccgggcaaaacgctcagcctgcggcggtgggcgtcactggtaaaggcctccgtctcataaacggggagcggccgcggccccaccaggctcatttcccctttcagcacgttgatgagctggggaagttcgtctatgctgaatttgcgcaggaagcggccgaaggggaagatgcgagggtcatgctccagcttgaagatggggccgttcatgtcgttgccgtaactggccttcacctcatccagcctcttgtccgcatcccggtacatggtgcggaatttccacatgccgaattcccggccatacaggccggaacgcttctggcggtagaagacgggaccgcggtcagacagcttgatgcctacggccgccagcacccacagggggaacgtgcccaccagaagcaggagcgcgcccacccagtccagtatctttttcaactgccaggaggtggtgtagggaatgggggtggacttgtacaccagcattctggttcctcccagcacgccaaaataggttttatgcacgtcgggcatgctcactaccatgctcgcgtaaaaatccactcccatcttgccgcacagctccaccaggcaccgcgccacggcggagtccacctcctccggaagaaacaccaccttgctgatgcagcccttgatcagcaaattcctgacctccgcgcggtccacctcttccggagccatcaccagcagttcatccttgaagtccacatggtcgctttccagcatcttgcggaactccttcacatggtccggaatgcccaccaccagcgtgggggcctcctccaccagcctcttttccgcccggaaccggctgatgcgcagccagagggcgcccaggaacgtgagcagataggccagggtctggacaataatgttcgcggaaaagggaacaaagtacttccacgtcactacgctcaacaccacaaaacaggcgtacgccatgacaaaccgccggatgcttccgcccagcgtcatgcaccggtagtaaacgcccagctggtcacagcagacatacagcagcagggacatcgtcagcggcgtcagcaccagcgtgcgcagccgccacggttccggagccacccccatccattgccacgaaacgaacccgacaacgaagaagatgacgaatgcgaggatggaaacgacaattttattgatcccgtaggtagtacggtctgcattttgaatcagcatcgagagagagtgtaagttagtcggcacttaaagtgcgctgtcccggtctttttgtcaagttgcatgctcaccctgccgctttccgcccggaataatgcgcccttccggacggtcttcctgtctccggacgggcggaaagcccaaaatgacggtataccggcttgcaagaatccggctccctgtgcattggtatacgcgtcaatcgaccggactggtaccgcacctagcctgatcgcccccctatcagaccacgcatggaccgttgatcggggcacggggcatccttactcctggcttttctcatggtagcggaacgtcccggcgattttccggatggaacttactgcgtacagcgataaatccggcatgacaccaacataatcatcaacttagaatataagtatgtcacagcacaacacacagggaagacagggccagggagcccgtcgccgctataacaagggcggacgctcctatggcaatgaccgccgggattccagcggctaccgtcccaagtataaaaaagaagcacctgccaaactctccttgtggcagcgtttcctgggcctcttcggcatccgcccggccaagaacaacaaacccgccgccagggataaagccgccgccaaaaccaatacccgcgtggcccgtaacaggcaggagcgcgtttccgctcccaagcagcccgtctccaaccgcaggctttacgtgggcaacctttcctatgaagcgacggaaagcgaccttgaagacgtgttcaagggcatcggggaagtcagctccgtggaaatcatttacaacccccgcacccacaagtccaagggctatgcctttgtggaaatgaagaagatggaagatgccgtccgttccgtggacatcctccacaaccagcccttcatgggcaggaacctgctggtcagcggcgccaatgaacgccaggaacagtcccggcagccccgcgaaacccgcgagccccaggaagaacaggtttccatggaggaagtgaaggaaacctccactcccctgctccagccggaagcttccgctccccaggcccaggaacaataaccgttttatcatgcagaagccggcctttggaaaaaggccggcttcttgcgtttacaggacgacgcgttttatccctctttcacaaaatcctctttcgccctccgccttctctttccggaaaaccttcggcctcgccccggtcaaaaacgtgcaaaaccatgcagcccacacgcttgcgcctatgccgccacggactggaaaaacttgaagccccgtgtcccccttcccggcgacggaatgagaaaaggaccatgaccgtcacggcaatccccaggctccgcgcaggcgcaggtattccttggcgggcaacaggatgtaaaggggatgccgggaggggtccagccatgcgatcatggctctcaaattttcctcgctcatggcggtgcaccccgccgtgggagctcctccatccctgcgccagatatggaagaagatggaggaaccggcccccggcacgggtttttcccgtccggatgcggcattatgccggatgaacagtttcaggctgtgggcgtaatcgttcagcttcatctgctgcttgaactcccacggcgtgacggggtcatgcttcagcacgaagtgctggttgtacagtggagaagcgggatcatccacccacatgtcccgcggcgtgatgcggcggtacggcatggaacgcttcttctgcggaacgggaacggtgccatacacgccccccagctcaaagatgccggcgggagagcgcaagtccccctccttcttcaccggaccgccggagggaggcatgctgacgcccctgccccacaccagaccggactttcccagacgcgccggaaacggacctttcaccatcacccagccgcgcggccccttctccagaaggctcaattgcacatgggagctgttccagccgtccgcggaacccacaatcacctggctgcaatccgcgggaagagccgcggccgaaaaacagaacgccgccagcatgcacaaacacaggtatactgccttcatgggccgtagcataacggcgccgctccggaaaaaaagcaaatactccgtctccgcagccgcaccgctgaacggaaaacttccctagttcagcggaagaacctcgttcaacagggattcgatgccttccttggcaaagcgggaatacaggtacagctttttggcctccatgtacttgcccagggcggaacctacttctcccgcgttcctgcacttttccgcatcattcagcaggttcaccagggtactcgccttcgtcgtcaggtccagatactgggcgttcaattcctggtcattgatgaacagctcctggtccttggaacggagctgctggagttcctcccaggcgccgtacacgtcctgcatggcttcgcgctggcgcgccgcgcccagagcccgttcaataacggccatcttgccaaggtcttccacaaactgcttctggagttccggatcatccttcaccagaacggcgaattcatgctggttgtcaaagatgcggcggtaattcttattcttgtggaagcgcttgaagtcctccagcgcgtgggactgctgaccggcggccatcatggcgttccgcagcggaagaaggcgggggttcttgggccagatttcaatggcgctcttcaggcattcctccagcttggcccggtcacctctggcgagggcttcctggccctgggcgatataggcgtcactggcgaacacggcggcgctgatggcggattccgcacggcccgtgctgaaatcccgggaggtcttcttgaggttttccaccagggtgagggcttcctcgtaatccttgccgttcatcagctcaaacagcttctccacgtcccgcttgaaggcgtacagcttctgcttcttttcatacgggaacgtgttcacggcgggcatgaactccccgatcagcagcgcctcattcaaccgttccagggcatccacgtaatgatgggaatcaaccaggttgttcacggccttcatgtggcggtcggaatcacgggccagctcccgggaaaggttgtccagaatggcgacggtgggcggggtgcccagcgttccgctgaacatcttggcggcgtccgaattcttgtccagccgcagcttggtatccccgtcattgaacaggcggctgtaaatgccgcagcctatggaaacatggtcaaagcgccgctgagcgaataactgaaccagcgtggactggaaaacgatcttcgcttccgtcaccgtcagcacctgttcactctccagcttcagcttgcgggcctccatttccaccatgcgcttttccaggtacttgtagcgtgggttgttcttggccggattattggcagaagtgccctttttcccgcccttctggttggagggagagccggagctggtggtcacgccgctctccatgaggctcattttctgggcattgctgcgtatttccctctccatcgcttcaagcatcttccccttgttctttccattgctcttggcctgccatgcggtgtagatagcctggcagagggcatcggaaacgccaccgtccagcggattgctggaggcggcggtcagcaggtccaccacctgccgcaccacgttgtccgccatcagcttttccttgcgcatggaaagcgtctcatgaagcttttcaaaaatcttctggtattccttcgcatcctccgtgctttcctccggctggctcaggtacttattgaagcgcgcctcaatttcccggaaactgcccatgttcagcgttgttccgttgatggtcacggtgccgtcctggggattcaggaaaggaatttcattgccgtacagggacttggcatctccctgccgggaaggctggtaggcattcggctgcgcggcaggcggggaggaagggggcgcggcaggcgcaccgccgccggaagcggggggattgtacatcatctgccccaatgcgggaaccgcgcaggccagggtcaggagaaagcagcttttcatggggcggggaaggttgttcatttaggctgaatggatgtggctacgcatacgccgcgcaccttcggattgacgtcttccacccggaactctattctgtattgctggtcccggttgatgttcagtccgttcctggcttccgcagaaacacagacgggaataatgtactcacgaccggaagcgtccctgtacaaaaaggaaatcagctcggactcgccgcgcggaaaacggtcgatcaccgttccgtccagcgcatagttgttattggaaagctgggaggcgttcgccgccaggatatccagcggaatatccgaccccgcctgcggcttctccctagcacggaacacgacaaacgccacgatgacggccagcacaagaacagccgcgccggccatcagcatcggcgtggatgatgaggaactcttcttttttgctgcacgtcgtctcgccataacttttgatggaaaaagtatataacgaactccgtgcaagtgcacgcattaaattacagctcccagcgcgagcgtcggattcccgcgtaggaagccgcaatgccgcatgcaacatgcacgcccagaacaatgtaacaggtcagcgcgggcgtcaggtccgtatccagcacattcttgacggcgttgtacacgtcagatttcagggcggagatgctgccggaccacgcccagtatgcggaaatgaagggccgtatgaagccctccacctgttccggaagggccagcaccgctccggaaaggggaagctggaagcccaccaggtaaatgctcaggagggaggcctggtccgcactccgggccagggaggaaatgcccaggcatacaaaggtcatggcggcatccgccagaatcaggaacagcaggtgcgtcaggcccccgccgcggtcccagaagaagtccacaaaggcgaacatccagacggactgcaccagcaccagaacgctcaagtaggccagcttgctccccaggtacgcggagggcctcattcccgcgtatttctccttttccatgatggcccgttctccggccacctcccgggcggcattgttggaacccatcaggcccagcagaatcacctcgaacatgatgatgccggagacagcggaacccgtcttcatgttcaactgctgggcttccatgtccttctggatggtctggacgtcctgcgtggcggaaaggcccacgatctgcccggtccccttgtccgtgaacatggctaccagcaccgggaacagcagcaccatcaccagttgaagaaccaactgggaacggtcgcggaaaaagatgcgccagcgccgtcccagcaggcagaagaactgcgtgaagaatcccggaacctccggaatggcttccgccgcggcctccggggaattcccgttcccttccgcaggcgcagtttccccggaatcgctccgcacggcgtcccccttttccgttccgggttcctcgggagccttctccgcctccacattgctgcggacggcatcagggtccggcaattctccggaaagaatcttcttctccctttcctgttccaggcgggaataataggaatcccggtgcttgccccacgaacggcaccaggagggtccttcacggtcctgaagcttcggataaatctcttccagcgaggaaacgccgaagtaatgcagcatcgtcttcggagaaccgtgataggccacgcagccctggtgcatgaccaggatggaatcatacatgtccaggtgggaaaggctgtgcgtgacggaaatgacgatgcggccttccgaacgggagatttcatgcaggaggtccacaatatcgtgctcggacctcgggtccaggccggacgtcacctcatcgcaaatcagcagacgcggattggacaccagctccatggccagcgccaggcggcgcttctggccgccggaaagaatcttcacatcccggtccgcaatcccctccatccccgttacctccagggcattgtcaatgctgtcgtccaaatcgtccacggaatcgaaccggcagcggagcctggcggcgctctccacgttctcatccacgctcaactggtcataggcaatgctgaactggggaacgaacccgatttccgacggctcgaagtcctcttccgccaaatcatggccgttccagaaaaaacgtccgtccgtttccgcaatcatgcccgcaatcgcctttaacaaggtggtctttccacaaccggaagggccaacaacagccataaaatgcccgcgaggcacattaaaactaacattgtccaataatttcaaaggaccatccggtgtttctatttcatatgtaatgccgtccgcctgcaacatggttcttttactctagcgtatcaacttccgcatcatcaaggaaaatcgggcatcagtgttttatcttgccgtaaacgaagaatatgttattcaaaaactttccctttaaggcatttccccaattaaaatcaaatggttttcccccgcattcttgctttagccgccttgctggcccccctggcggccgccgcccggcctccatccgcggaccaaccccgttttaccgccgtcctggatgattggcgcatttcctatatggacgaacccggccatgtccatctcggaatctccatcatgctgcaaggcaaaggaacctttgtcattccttcttccggggaagggcagctcacgcgcctggtcatgcaggattcaaccggaaaagaaataccctgcaatccctatcagccatggggaacgcccggcaagctcaatccttcccatgtcatcgggtccaactcatcatcctctcccggttcaccctacaaaaccctgcaattctcctgcggattcagggagcttccggcccctcaatcggaatggctgcgcatccgcgggacctggaccgtccagttctgcccggaaccgcagcggctgatgctgaagcaaacggtcaaaccggcggaagaaccccagactttttatctggaccttccggaaccgaacgtccgggaggacagcgacatcgcccgggccgattccgccagcaacactgcttccattcagctgaaaaccaacgaagagcggaccgccctctcctgcgaggcggaattcccctcttccgcttccattcaaggctttgccattctggattcctccggactccccataccgggcctgcggcgcgcccatacgccggaaatcacagaacataaagatggtaaaaccagcatttcctgcctgcatgaaatggaagaaggagcgggaaaaccatccccttcccttccccgtgaattgaatctcggcgtcgtttaccttccccgcaaacattcactggatgttcccattgacctggccgtgaacccttccccctctccgccttccactccccgggaagcggtgaacaaccatgaatccggcctctccgcacaaccgtcaccggctcttcaggtaaaattatacaattgggttttccataaagaaggccatgaacccgtcttcctcggcatttacattcatacggataaaaaccacaccctgcttaatgatatggaacagcagggcgccagttacatcaacctttccacccccggcggaaaaacagccgttcactgccgggttcatccccccacatggggcacttccacctacaatatgctctttttccctcttccccgttcactgcctcccggcgacaagggatggctgctgaccggggagctccgcgtgccggccggagaggtccggacaactccggcccggacgattcccgcagaaccgggcaaacaatgggcgatcgacgttccgggggcatccggagattatcctcccttccaggttcaggccaccctcctcagcatcaagccctcagcaaaggaattccgggccaccttcaagttgaagggtcaccatggaaatccgcatttcagcggcttccatgtggaagggggcatgcagatcatgtccaacaaggatccggaggatgaaaccgcgcagctcatcacctattcctttccgcactctcccgctactttaagctgctgtgtaaaatacattggccgtccaaccgtcatacgccaccccctgaacatgcgcatcgggctgggaggcatcgtcccggaccctccggaaaaatgacattccgctttttttcatggcttccgtcctgttacggaaccatgatggaggcatgatccggcaagcgtcccgggaagattttccggcaatcctgaagcttcaattactcgccttcggagaagtggcggagcggcttggactcgccagcatcccgcctctggaacaaaccctggaacatttgcgggaagaggcgcggaacagcgtcttcttcaagtatacggaaaacagccgcatcgtcggctccgtcaggggctgtctggacggcaaaaacgtctgccatgtcggcaagctggttgtggacccggcccgccggaacaggggaatcggccagcaactcatgcttgccctggaagaacacttccgcggacaggcagccgcctaccttctgttcacttcggcagatactcctgaaaccctgtatctgtacctcaaactgggctatacggaactgtaccggaaagaggccggagggatgaccacggtgtttctggaaaagaaagcgtgaggccgccggaagccctcatttcatcagcttccacaccgccagccgggtgatggagcctatcagcagaagagccgccgcaatcaggaagggagaccatcccagcgcccccgcagccagcagaaacgccacggcgcacaccaatagaaaagcattgatgaaccgtatcaggatccattcctccggatagaggggcgataggctgaaggcatccgccagcctgtccatcacgaattcaagaatttcactttccatccattcccacatagacttaacttttttaccgcaatttgaccatcaatgatttacctgcacatgcaagtaaaagaatggtcggagtttttcatgatgaaagggtttttcaagggcccggaggcccttgttcccggcagcgcgggcatcaggcaacacaggggaatggggccgcccatggcgtggacaaaacaggcatcccggccttcacggaccctattcagaacgggaagtccgcatcgcccaccgggtccacggccttttcctcaaacttcttcacggctttctgctggggattcacggcgcggacgacgagcgcgcggggcggcatttcccggcgctttttgaactcgcacttttcctcgcacaggttgcaggtattcaggcgcgcgcgttcctcaggccgttccgtggtgacggggcaggcatgttcgcacgcgccgcagccgatgcacagggaggggtccagcctgggcaggcggtgttcctggccgtcccgcccgatgtagggcaccgtataaagggccttggtggggcaatgctccgtacaggcgccgcagtccatgtcctcccgggcaaccaggcagcggcagacgtaaaaccgggctacggcgatgcgcgtggtatccttcgtaatttccgcggtatccctctccgcagtaatgggcagcctgcgaatggctcctgtggggcagacttccgcgcagcggtggcagtcgtacagacaatacttggtggaaaaatccatccggggcttcatgaaccctttcagcccaagctgcaaataggcgggctggagcacatgggtagggcagttggcaatgcacatctggcagccggtgcaaacatccagaaaacgttccagggaaccggctccgggaggaagaacgcactgggtggggtccagcctctgggcggcgtcgccccggcatccggaaagagccgccgtagccaggccggccgccgtagcccccaggaactggcggcgggagctcccggcaatgaagggaaccgcggcagaagaagcgggagcgggcgccggagcggtttttttcttcctggcgggaatcaggcggcgggttttggcaaaccagcggtagcgtatccccccctcgctgcacgaacgcacgcagtcatagcatgctacgcagcgggaggcgtctattttgtattccttgaggttcaggcactgggccttgcatgatttgacgcatttgccgcatttcttgcaggagacgggatcaaagcccagccggaagagggaaacgcgggaaagcagccccagcagagtaccgacggggcataccgtattgcagtacaaccgccctttccaggcgctcatggcgaccaccaggccgagcatgccggcagaagccagcagagccgggagagccacgggaaaataattcatccggaccaggtccgcggaagaactgtcagccgccagcaggttattgctccagatggcggcaggccacgccagcacatacatgatgcgcccgaaaatgctgtacgggtccagccagttcagggaaagtccggccagtcccgtcacgcagcaggcggccagcaaaaccagaaccacataccgcacccacggcacggggcgcgcaaacttcaagaagcgcttcggcgcaatccagcggcggattctgaaaacgatgtcctggagaatccccagcggacagaggaaggagcagtacaccctcccgaacagcagcgtaagcagcagcagaaccgccagaatcacggcggaaacggccaccccgtccagagtcccgagcacggatggaatgaattgccactgagccaggaaaaaggagtcttccatgccctctccgccgcccgtcatgttcggcacgttccacgcggggatatggtgcaggaaagcgtacgcaatcccgaggaagaagatgacggccaccgtcacgcggagccacttcagcggactgacgaaaaaggctttgatgactgacatatttattttaaacccgccggaggcggaaagttggcccccttcgcgtcatccgcaggagggggcgccgcgtcaggccatgctgatgcggcggatattgagcttggaaaggtcggcggtgcccagccccatttcttccccaagctgcacgtggcggatctttccggccttgttcagcagggccgcgcctgcggcgtcaatggctacgatgtcacgggaagccagaagggttttgcgctccaccaggtcattcgtgtccttccccacggggccgttgcgcaccatgggcatgtaggcgtccagcacgcacaggtccggcttgcggaaatacacggcgtccgcgatgcactggtgcaggtcgttcttatgcatggctccacggtcccagacggtgcccatcacgtttttcatgcaggcggtcatctcggaaccgctgtggtgcttgagcggggggcaggtgatataaacgtccgcttccagcacggccttgtgcaccttggcggaggtgaattttttggccttcgggttttccgtctgcacgtactgcccttcattgccgccgtccaccatcacgcccccggctttttccacggcctctttcacgccgctgccttcataggcgccgttgtggcagcagtggtcgaataccctgacttccttcgcccccgcctgcttgcacagctccaccagcgtggcgacggtttcaggatgggtgttggagccgaattccggagccttgttccagccgatgttgggcttgatcacgacggtctggcccggcttgacgaatgccttcatgcctcccagcgtatccacggccttcctgaccatttccgcacgggttccgttgcggacggccaccaggtccggaatgccggaagctgccgaagctccggcctcctgggcgaacagggaatccatgtccgatatggctgccagcgcccctacggcggcagtcccttttagaaaagtgcgtctgtcagtcatcttcgttgcaaagtcagtggtttatccccgcatgcaaaggcatgtacaaggttttatgcctcttcctaacatacgcgttgctgaaaaacaacctgtcatcattcctgcacgggaatttttacaaacgaattgtcatacaggggcggctcctataaaacccggtcatgaaatgttccctgctcagccgtcccatgacctgcacgcatgactggatcagccgcgtcgtcctgcccggggatacggtcgtggacgccacggcaggcaacggacacgacacggttttcctggcccgtctggccggcccttccggccaggtgcacgcctttgacgtgcaggaggaagccattcgcgccaccagggagcgtctggagaaagaagggctgctcacctccgccgtccacctccatctggccagccatgaccgcctggcggaactggtcaccggtcccgtgaaggccgtcgtcttcaacctgggctacctgccgggcggggataaaaaaacggtcaccagaacgggctgcaccctggcggcgctggaacaggccgccgccctcatcgccccgaacggccttctcagcgtcatgtgctatcccggccacgaaggcggggatgcggaagcggaagccgtggaggatttcctttcccgcctgccgcaccattcctggcgcaccggcaaataccagctcctgaataccggaactccggcccccttccagatctgcgcgttcaggctggactgaccttccccgtaaaaatacgggaacaaggccagttcaccatcaaatgcccggaaaaaccatcagtcccggcattccttcatccattccaccacctgcgccagagcccgggcgcggtgcgacatggaattcttcacctccatgggaagctgggcaaaactcagttcatggccttccgggacaaacagcggatcatagccgaaccccccttccccggccggtttcgtcagcatgtggccttccacggaaccggaaaactccgccagcacgctgccattcctggcaagcaccatcacgcagcggaaccgtgcggagggcttgtcccccggcttgactccggcgcgccgcagttcctccatcatacggaggttgttccgcgcgtggttcccttcctccccgccgaaggaggaggaccagacgccgggacggccgcccagcacatccacctccagcccggaatcatccgccagcaggacgccgggaatgcacctggaggcggaaagcgccttgagcgtggcgttctccgtaaacgtgactcccgtttcatccacgggcggagcctgggggtagtcggaaaggtccttcacttcccattctccggccagcatggcgcggatttccccggtcttgtgggcgttgcgcgtggcaaccaccagcagaggcaattcttgttccatcatcatgaattttttgcagttgaaaaccgtatggaagaccgcgttcagcagtcaatttccaggctgacggggcagtggtcggaccccgtcacgtccggatggatggcggcgcccttcaccctgggagccagcggattggaaacgcagaagtagtcaatgcgccatccgacgttccgggcgcgggcgcctgcgcggtaggaccaccagctgtaccagcccggttcctccggatgcagggcgcggaaggtatccgtgaacccggcctcaagcagcagcgtgaacccggcgcgctcctggtcgctgaacccggcggaaaaacggttctccctggggcgggcgatgtcgatctcctcatgggctacattcaaatccccgcagaagacgaccggcttggtttccgccaaggccgccacatacttgcggaacgcagcatcccactgttctcggtacgggaggcgcaccagctcgttctgggaattgggggtatagcagttgaccaggtaaaactgttcaaactccatcgtgcacacgcgcccctcccggtcatgctccggccagccgattccggtggacgtggaaaggggctgcacacggctgaggatcagcacgccggaataaccggccttctccgccggattccagagctggtgcggccaggaggaaatccacaggtcattcacctgttctggacgcgccttgatctcctgaaggcagaggacgtccggctccagcgcctccacggcatcccccattcccttgccgaggatcgcccgcaatccgttcacattccatgagacgagtttcatgcacgcatacttcccgtttttgccggctccgtcaagccctcaaacacccccgccccgcacccttccgggggaccgctgaaaacccttcttccggaatcatccccagtcttttgcatgccgcatagaacaagcgttttttcttgccaggaccgccccctcatgcttacttagataggcaaacaccccgagagacactcgagagtgggtctgtcgacccgctcttttttgtctatccatcacactcctccacactcatgacaaacgatatcaaagctttaattgactactacgagagggaaaaagggctctcccgtgaaaaaattcttctcgctctggaatccgcttttctctccgcctaccgcaagatggttcccggctccggcagcatcaactacctgagggctgaaatcaacgtggacaaggggaaggtgcgcatctttgcggatctggaagtggtgccggatgaagaatactccgacaagttcaaccaaatccccctctccctggccgtcaagctggaccggaacgccgtcctgcacgacctgctgcccaccaacatcacgccgaagggctttggccgcatcgcggtacagactgcccgccagaccatgctccagaagctgctggatgcggaaaaggaaatgctttacgacgagttcaaggaccgcgccggcgatctggtgacgggcaccatccgccgctttgaaaagggggacatctttgtggacctcggcaaattcgagggcgtcatgacctcccgcgaacgcgtgccgaatgaagactacagcgtcggcgaccgcatgcgcttctacgtggtggaagtgcgcacggaagcccgcggaccggaagtcatcctctcccgcagccatccgaatctggtgcgccgcctctttgaatcggaagtggtggaaataggcgaccagaccgtagaaatccacggcatcgcccgtgaagcgggctaccgcaccaaggtggccgtcatcagccatgacgacaaggtggacccggtgggcgcatgcgtaggcatgcgcggagcccgcgtcaagaacatcgtccgggagctcaacaacgaaaaagtggacatcctggaatggacggaggaccccgtcatcttcgtccgggaggccctcagccccgtggaaccgcgggaaatcaccgtggacgaggaagccaaaaaaatcttcgtcatcgtccaggacgacaaggacctctccaaggccatcggccgcaggggccagaacgcccgcctcacctcccgcctgatgggctgggacgtccaggtgcgcgtctttgacgtccaggaagcggaaaaacgccagaaccaggccgcggccgaggaagtgatgcgccaatgccaggccgccgcaaagaccctcagcgaacaactggaaatcccggaagaaaccgccatgggcctggtgaccatgggtgggacggacctggtggccctcaccggatttgaagcttccgacatcgcggaaagcatgggcattcccgcagaggaagccgcccagattctggacaaggcccgggacctcatctcccaataaccgttgagcgcggcgctcaatatctaacaaacttaaattaagatgcctaataaacaagaagagaacgaacccaaaaaggaagtgttggatctgatcggcggatctcccaaaaagaaacgcgcaccccagccggaacccgcaccggcgccatcccgtcctgccccggtcaagaaagaagctctcgacttgctttccggccccaagaaaaaagcgtccgtctccgctccctccgagccggctaccgcccctgcccaggccgcacccgccgcagaatctgccgcgcctgccccccaggaaacggactccgcagacgataaaatcatcaacctcaagccgcccgtctccgtctccgagctggcaggcatgctgcaagccaagcccttccagatcatcaaggacctgatgggcatgggcatcttcgccaacccgaatacgccgctggacgcggacgccgtcagcgccatctgcgacctgcacggctacaccttcgcccgtgaaaaacgggaaaagggcggcggcgtcaaggcccagcaggaaccggtcaaggaaccggaacccgtgccggtggtggaagaacccaaggccaccctcatcctgcgcacacccatcatcaccgtcatgggccatgtggaccacggcaaaacctccctgctggactacatccgcaaggcgcgcgtagccaagggggaagccgggggcatcacccagcacatcggcgcctatacggtggaatacaacggcagcaccctcaccttcctggataccccgggacacgccatcttcacggaaatgcgcgcccgcggcgcggacgtgacggacatcgtggtactggtagtggccgccaatgacggcatcatgccccagacgagggaagccatcgcccactccaaggcggccggcaaaaccatcatcgtggccatcaacaaatgcgaccttccggccgcagaccccgtcaagaccaagagcggcctgatggaggaagggctggttcccacggacttcggcggcaacgtggaatgcgtggaagtctccgccctgaccggcgacggcatcgacgaccttctcggccttctcgtcctccagtcggaagtgctcgaactccaggccaatcccaaggccaactgccgcgcctccatcattgaggcccgcgtggaacccggcacgggcagctccgccacggccatcgtggaaagcggcaccatccgcgtaggcatgcccttcatctgcggcccgtacgccggcaaggtgcgcgccctggtcaacgaccacggcgaacgcgtcaaaaaagtggggcccggcatgcccgtggaaattaccggcttttccgaaaccccgaacgtgggcgacgaactggtggaaatggaaaacgaacgcgccgccaagaagctgggcgaagaacgccaggaggaactgcgcaagcagcgcctggcccagccccgcaaggcccgcatggaagaactgctcgccatgatgggcgacggcacccagaaagcccagctcaagatccttctcaagggggacgtgcagggctccgtggaagccatcaagaaggccattatggacatccagtcggacaaggtggaatgcgtcttcctgaacgcctccgccggccccatctcggaatcggacgtgctgctggcctcctcctcggacgccgtcatcctgggcttcaacgtcaaggtggaagccaacgccgtgaaactgctcaagcgggaaggcgtgcaggtaaagctttactccatcgtttacgaactcatcgaccaggtgagggatgccatgctgggtcttctggaaccggaaacgcgtgaaaccatcatcggccacgccaaagtgctccaggtcttcaaactcaacaagggccgcgcggcgggctgcatggtggaggacggaaaaatcctccgcagctgtgaagcgcgcgtcatccgcgacaagactcccgtctttgacggtaaaatgtccaccctgcgccgcttccaggatgaagtggaagaagtcaaggccggcctggaatgcggcatccgcctgggcgacttcaacgaatacgaggcaggcgacatcatcgaatgctacacgctggaaaaaatccagcaaacgctgtaaccccaagcaggaatcatataacagggatggacgcccctttcacgcccctccgggcgttcaaagaagctccatccctgtcctttctcccccattcttccttctccgattgaaccaatcggtccatccatcactctatcccttcatatgagcagacgcactgacaaggtaaatgaactcctccgccgtgaaataggcaccaccatccagcgggactttgaattccccggaacgattgtcaccgttattgaagtggaagtgacggacgacttgaaagaaggaaaagtatgggtaggcgtcgtaggaaaaatgtcccccgcccaggtgctggaaaaactgaactccaggcatggcctcatccagtccgccgtagccaagcgcgtggtgctgcgcaacacgccgcgcctgtcgttccggctggacgactccgcccagcgcggcgttgacctggtcaacctcctggaagacattgataaaaaccttcccaaagcccctccggccgatccggaaaacggcgaggaataaaaccctgctgaacagtaaaaaatcctccttgtctttttgcaagacaaggatttctttttccggccaaaagcacggaggcaatcgccgtgccgtgtttacggaccggcaaaacggcgaagtggaattggcaggatgattttttcaggggaaattctgtaacagatacaagggccgggaggcccttgttcccagaggaaccgttaccgggaaacggggtggaatttatttcttccttacctcgtcaccttcaacctcaggaaccggcgtgccggggcgctttcctccagagccgccgtatcacggaattccccgcggacaccggccggagtgacgattccttcatcggaccattccttcaagtcggacgaactttccacactgaacgccacatccgccgcttccggatttaccggccaggaaagcacgaggtattttttgcccccttcctcccggatcgccagccccgtcacgcttccgcacggtttgttggggtccaggcccgttgcatacttcatcaggttggtgaccccgtctccggcaggacaggcatccggagccatctggtcctccggcgttccgtccccgaagttgtcctttttccacttatcgtaccctgccggggccggagccgcggactgggtcagcgtgaacgttctttcctcgccgccgcactggacggtgaccacggccacccgttccgtttgctgggcgttggcttccatttgaatgtccagcgtggcagttccggagcctgaagccggccggaccgtgacgcaggcctggtcacaggatgccgtccatggaagctgcgtctgcacggtcagcgtggtggaggcagcggcaaaccctacggtttcctccgttttgtcgatattgacggggtttacgtattcatagctgaaggcgctggcgggaatctcctgcttgcttattcccggcccctcccattgcatggtgagggcagagccggaggcgtggcccacataaccgatgcggatgggatgcacccccgccgcaagccggacggcctgtaccgcattgggcgtgacttccgaaccctgccgggcattggagttggcttccgtgcccggcgtataggcgtagtccgcatcaatgagctgcatgccgtgcaggtgtacgaaggctttggatcccgcgttggaatccgtctgaaggtagaatttgtactcccctgtaacgggaacggtaaggtagcccgtgagttccacccccttttgagcggcggaaccggcattcacgctgagagaagccacagcgcctgtgacagagggcgcctcttccatctggcggaagtcgggcacccagtcaaaaccacggttccagcagcgcattttcagaccttgccggagattggccggagccgttgcagcgggcacgtcaccggcattcagagttccattcgtggaaggcagggagcgccgcacagacaaggcccgggccttcatcttcgcctgcaagtccggacgggaggaggcgagattggaagcttcctgcgggtctttttcagtatcataaatctggaagtcctgatccgtcccggaaatgttgaaacgcacgcctttaaggccatccacaaacacgacctgctgcaaaccgcggggagagcttttgtggtgcgacaggaagtcctgataggaggcgccattgccgccatagttatattcggaataaatcaggctctccttctggcgttccggcacgccggccagcgtcggcagcagggaaacgccgtcgcagcgcgcaggaaccgccacgcccgccgcatccgcaaaggtagccatccagtcatggaactggcaggcattcaggctgatgccgttggcaggaatcacgccgggccagcgcaccagggtgggcacgcgcatgccgccctcccagcagtcgcgcttgatgccgtccatcatgccgtagctttggaagaaggcgggattctgcgcgccccgctggtgctgcccgtccgaaccgctttcattatgaggtccgttgtcggaggtaaagacgatcatcgtgttgtcatcaattcccaaatccttgagcgtttgaatcaaatcccccatcacatcatccacgcgcctgatcatggtggcgtggcgtttctccgtctggttgggggaagcgtcattgattccctcattgtccggatggatgtaggtatccttggagaaggttccttccaccccggccgctgccgcccgctgcgccgtagccgtgttggaggcttcatacccgtcctcattcccggccacccactgcaagcctcccttgaggcccggtttggggggataggcgcacgcgggcaccgccagggaaccgtgcggagcggggaaggccaggtacaggaagaagggctgggtggccgatttggcatggtggtccacgatccactgcttggcgcgcgcgccgaacaggtccgtgtcataagccgtatccggaaccttgttcgtcacattggcgaaggcgggggaagaggcgccgtcattgtattcgtaaatgttcttggattccgtgatgtagtggtagtgccccgtcaggtgctccataatcccgtaaaagtaatcgaatccgcgttcgttggggcgggcatacaagccggacggcccctgtccgtagccgccgatgccccatttgccgacagccgccgtatggtacccggcgcctttcagcaccgtggccagcgtgtgggagttttctatgggataatcaaagctgttgttgcggataacgcgggaatggccctggtgcacccccagcagcagggaggcgcgggccggagcgcaaacgggcgccgcgctgtaatggcgccgcaattgcatcccttccgtcgccatggaattcagctgcggcgtcttgaagctgttgcgccgcgtcaccgttcttccgttcttgtcctgatggttccagttttcttccaggtcgccccagcccatgtcatccaccagcacgaagatgatattgggcctggccccggaaacatgccccggcatggccggcttttccgccacatccgtctgaagcgtcagcaatttggccgcctcatcataattccatgaaaccgcccctttcggcagttccttcacggtgatggaggcggtcgtttccggcttgaactgcacgcccagcgtatgcctgcccggccacgcggcaatgagatcttcaaaagaggaatcaaacaggacaacgtattcccgcgcttgcagggaggggctctccggctgtacggctgacttttgcggcacgccgtccagcacggatacatggacgcgccccagcgtcagggaagagctgggcagggaaatgtccccctccacggaaagagcgcctccgggcgcataagtgatcgtccccggaaacgtgccgctgccgcccagcgcgcagctcccctgcaccaccaggtccaccgccggaatctccccgtcaaaatggatggaggagttgttcagcgtaatcgttacattcttgcccacgttccggatttcccccgccttgacgtgccggtccgtataagtcacccgggcgtcatccagaatcgtctgtttcagcgtccccttgtcaccggtaatgccggatgagccggaaagcgtcacattcccgtccactccagtttccgccaggtccagcgtggaattttccagcgcaaattccgtgttcgcgccgatgttccattggccggacgccttgacagaggttccggaaaaagtcacggcggccttctcctgcgtcaccagggagccctggtacagggacatgccctccagccgcccggcgtcttccaccgtaatcgtattgctcatgccccggtccgccagatccagcgtgggcattcccttcccggcactcattacaaaaccgatgaggccggaaatattattcagcagcattccttctccaatgcgcacggctccccctcccgtcaccgtcacgcgccgcggagcatcgttttcagaagtcagggaatacaatcctccggagggagctccatcgtcctgccccacataaaaacagcggccttccgccacattccactcctggtcggcggctacgcgcagctgtgcaatcccgaaatccgcattataaccgcccgtgctcgtgttttccacggtaatgccgcccgtctccacgcgcagatatacgccggaagaagtattcaacacgaagagctggatctttcctcccggctgattgttaactcccgccacccggattcctttcaaataccgtcctccggaccccaacccgcctatattggtcatgccagccgaatccgtcccgttcgtgaccatccaatgcgtgtaggcggaggccgacgcgccgggagcagccgacggcgcgcttccgttcagagcccagtttgacaagttcgaccagggagacgccgcccctttccagacatattcatcggcggcagacctggctggcgcgagaaataataaagaaggaacaagaacagataagaaacggtacaggaacatggcaagctggcggaaaagtgattcaaaaggcatcaggctaaagaacaaactgcctgaggaatcatgttgattactgatattaaatattaaaaagtgttagattctgctaactgaaaataaaaaagccgccaatttcaaaaaacggacggcttgatcaaatgtttcaggagcatggacttaaagtctgcggcggcgcatcatcagcgcagccagccccagaagacccagggaggccgtggcaggttcgggaaccaccaaatcaccgttaatctgaattcccgaaagcccggcaaagcagcccttgttataagcgctgttattggaagccgtgatggtgatggtcagggattccccggctttcagcagaaaatcatcgtacgtgtggcttcccgtatgaatgccggtccatgcgccggtggaaccattggcggcggtggaaccgttataggtcagcgtctggtccggctgcccgtcaatggagagagtcatatcgacaggtttgttgaaattgccttcatatccgcccacataaccattattggctataccgccaccgccattctgggcagcccccgcacccgtgaacccgaccatggacaagtcaatggaagatatcagcatgtcgtgggaaccggtattggtgaatgtgaaggaaacgctccatgtattgtttccggcgcctcccacattggcattgggagaaaacacggaggccggaatggaacctgaggccaggaggtcattgcccgaggtgctcttgctgaaatcgtcagaactgatcgaggtggaggaagtgagccctacatcggatgtcgtgttcaccgtgacggtatccagggaagtgccggtccggttaaaagtagtggaacacaacaccgcagcctgggaaactgctgttccaaaagtcagggaggcaatgattatcaatgatttcttcataactaggagaggttggatgaaagcaacctttatcccttagcggattgccaatccgaaaaagaaatccgatgtgccatttttatgcataaaaatctggcattaggaattttacaacgatttaaaattcccaaaaaagaaactctcatcagaaaacgcccctgggcgtttatcttcctaaacatcttgtttttatcatttattgttgacttcggattggcaatccgttccgtattttttttctctttcactaacggcttgccagaagagaggagaacagttaagttccccgaacggacagcctgtccatgagatggctggacctttttccaacatgaacggttactgctacttcattctggggatattgatcctggcggccggttatttcacctacgggcgggtgctggaaaagattttccggccggacgcctcgcggcagactcccgccgtggcctgcacggacggcgtggattacgtggtgatgccgcgctggcgcgtgttcctgattcagttgctgaacattgcggggctgggccctatcttcggcgccgtcatgggcgtgctgtacgggccggccgcgctcctgtggatcgtcatcggctgcatcttcggcggaatggtgcacgattacttttccggcatgatttccctgcgccacaagggggaaaacctgccggaaatcctgggccgctacctgggcagccaggcccagtggatcagccgcgccgtctgcatcgtgttcagcgtgctggtgggcgtcgtcttcgccgtgggccccgccgccatcctggcccccatgacgggctggagcgtttctgcatgggtgtggatcatcttcggctactactttctggcgaccatccttcccatccaagccatcatgggaaaggtgtatccccttttctccgtcgccctgatcatcatggtcgtgggcattctgggcgtgatgctcctggctccctttgcggaattcatgccgtactggatgcacattccttctatggaagtgctcccggacctggacttcttccataaccgccacccggcggatttcccgctcttccccgtgatgttcatcaccatcgcctgcggagcggtgagcggcttccacgccacgcagtccccgctgatggcgcgctgcctgaaaacggagcaggaaggactgcccgtcttcggcggagccatgattacggaaggaatcatcgccttcatatgggcggccgccgcgctgaccttctacggcaccccggaagccctgggagcggctaccgccaacggaaaggccccggcgctggccatccagatgatttccgaatcctggatgggccacgtcggctccatcctggtcatggtcggcgtggtcatcctccccatcagcacgggggacggcgccctgcgggtcacgcgcctgatgattgcggattgcttcaagctgaaccaggagcaactgagccgccgcctgatgatcgccatccccctctttgccgcagccattgccgtaagcagcatggactacgccatcatctggcagtacttcggctgggccaaccagctcctggccgccgccaccctctgggccgtctccatttacctgcgcagcaaaaaccgctgctgctggacggccgccgttcccgccgccttcctgagcctggtggtgctccagtacctgttctccagcccggaaatgtgcgggttcagttatgaagcttccctggtctgcagcgtcctgctcgtggccgtcatcggcgtgctgtgcctgttccgcggctccggactggaaaaagcggaggagcccaacctgtaatttcatgaaccccagcccccatacgcccggacacgcccgcaaggttccatggggagccttctggcggctcgtgctgatccaggcgcagaattcctttaatgaaaagggggcgcaattcctgctcattcccctgggcgtctggctgtacggcacgcagggagacctggaatacccgcttggggccatcatcgtgctgcccttcatcctgttttccccgttcgtcggctggctctcggaccgtttctgcaaggcgcgcatcatccagtccatggcgctgctccagatctgcgtgctggcgggcatgtactggagcctgcgtacccataacctggacggggccatcctgtggttctgcgtctttgccgtgcaggccaccatcttcagcccgtccaagaagggcatcgtcaaggacatcgtgggcacctcccgcatggggttcgccagcggcattgtggaaatggcttccatcctcagcctgctcatcggccagatcggcgttttcgtctggttccgctacctgctggagccttccacggataccgtctggcaccactggctgggggaaggcttcttccagtggtttgacgcctggctgaaaccctccggcctcaacgacggctggtatgccgcctccttcccctgcctggtgttcctgctgatggccgttcccgtggcgatttccagcttctacctgccccggtacgctccggagggtttccggcccttctcctggtccctgttttacgaacacttccaccaactgggcaagctgtggaaaaaccgcaacctgcgcgtcagcgagatgggcatcggctacttctggttcttcggcggcacgatcatgctgatgaccatccagatggccaaggaaatctccggcggcagcgacgatttcagctccgtgggagccgtgctgatggcctggatgagcggaggaaccgtgctggggggcatcctggcctccctgatctgccgccgccacatccggatgaacgtctccgtggcgggaggcgcgctgatggcgctgagctgcgtggccctctctacggtctccatgacttccacggtcttttatgccctgctgatggcggcgggcatctccgccgcactgttcctggtgccgctgaacgccttcttccaggaccgggcggacaacgacaagcgcggggacatgattgccgccggcaacctagtggactgcgtgctgggactgatggccgtcggattccaatacgccatgatgctggtgattcccccctcctggcaattcgtcgtcatgggaatcctgagcctcggcatggcgtgggtgatcttccgtttttcccgcgtggcgccgggcgcaagataaaatgtactggcaatcaggcagtaatctttaaaaatcctccttttaaagaaaaacctttccctccttccgcgcaccctgcgccattctcccgtcagggcgcgcgatttacttgcaaacccgcttttattcgggcaacataggggggaaaacaagaagccatgaaaaagtatcttacccttctgttgtgctccctgtgcgccctggcgggcttcaccgcctctgcagcatccaccgccagcctcaaggacgtcaatatcgtcatctccaccaccaagggggacattgaactggccctttacccctccaaggcgcccgtcaccgtagccaatttcctgaacctcatcaacaggggctactacaagggaatctccttccaccgcgtgattccggacttcatgatccagggcggcgaccccaccggcacgggcatgggaggccccggctacagctttgaagacgagttttccccggacctcaagcatgatggccccggcgtgctttccatggcgaacgcgggacccggcaccaacggctcccaattcttcatcacccacgttgccacgcctcatctggacggccgccatacggtcttcgggaaggtgctgaaaggccaggccatcgtcaactccatcgtccggggagacaagatcaaggacatccgcattctggacaagaacgccgcggccgccgtgctgaaggcggaagccgcccgcgtggcccagtggaacaaggcgctggacgccgccaaataaaccgggagcaatcaacggcatgaatattctcaggcggttcatcaaccaggtcttcactccgcaggaagtggaggccacgccggagaacgtcgccaaatgggaaaaaagagcgcccggatggaccatccgctgcaaccgctgcggcctggaggaacccttcgggaaatacggcatcctttacaaatcggcaggcaggaaaaggaactttggccgctgtccccgctgccgcaaatggtcgtggctcgtcatttccggaaaaacggcgtgaaacaaccccgtattcatcatcaagcgactctaaaaatccatccaccaaccattcatttttatgaaaacactcattaaaaacgcacgcatcatctcccccggcattgacctgcccggggctgccgtggaaattgaaggcaagaccatcaccgccgtctatcccgccgggagcgaactccccgccgcagacaaggtggtggatgcggaaggccgcatgctccttcccggtttcattgacatccacagccacggcgccggcggctgcgacacctgcgacgccaagctggaaagcctccgcaccattgcggaatgcaagatgaaggaaggcgtcacctcctggctgccgaccaccctcaccctgtctcccaaggtgctggaagacgtgtgcgcctccgtggcggaatacatgaagaaccaggaattcgccaagacgcccggcatccatctggaagggccgttcatcaatcccaagtgctgcggcgcgcagaaccccgcctttgtccgccagccggactatgatgaagtagccaacctgaactccatcgccaaggttctgctggtctccctggcgccggaaatgcccggagccgtggaattcattgaaaaagccacggccagcggcatccgttgctccgccgggcacagcgcggccacccatgcggacttcaacaaggcgaaatccgcgggcttggtgcacctgacccactactgcaaccagatgtcccccctgcaccaccgtgaaatcggcctggtgggctccggcctgctggacagggaaatcaagattgaaatcatctgcgacaccatccacctctgcgcggacatgctcaagaccgtgttcaagaacaaggaaacggaccagatgatgatgattacggattccctggcctgctcctggatgccggacggccccggagacctgggcggcctgcccatcatcgtgaaggacggcgtggcgcgcctgcaggaatccggcgcgctggccggcagcaccctcaaatacgcccacggcctgaaaaacgtgcaccgcctgaccggcaagcccctcagcgacctggtgaaagccacctcctggaaccaggcgcagtccctgggcctggaaggcctgggcaagatcgcccccggcttcacggcggacatggttctgctggacgatgacttcaacacctgcaaggtgttcatcgacggcgtggaaaaatacagcgcgtaaccgcgcacccgcgcgccggacgggacggaaacccttccggcgcgccatccccctcttatcgtattccaacgttcaacattcacctccatggctattaccattgaaatgccccgcctgtccgactccatgcacgaaggaatcgtcctgagatgggtcaaaaagataggagacttcgtagaagtcggcgaccatctggccgacatcgagacggacaaggcccacgtggaactccaggcatgcgaggacggaaccctgatggaaatcctggtgccggaaggcggttccgccgcggtgggcgctcccattgcgctgcttcagtcggaattcggcgccgcctcctgcgactgccctccgtgcccgcccgtcaaatgcagcccgctggccgccaggctggccgcggaagccgggctgaacgccggaaccctgcgcggcaccggaccacgcggcaagatcatggccgcggacgtgcgcgcctccatacgccccgcagacggccccgcccgccgggtgcagaccccgctggcgccccgcgacacgcgccacgccacgcgcgtggataatttctacctgtactccctggaggcgaacatggcctacctggccgccatcagcacgcccatcgccgtccagtgcgaaaaactcatcggcggccgctacagcctctttgactacgtggtgcgcgccgcggtgaaagcgtgcatcagcgagccggaatggctggcgggagactccgccgcagaactgctcatggtgctggacaagggggaaaaatacgtcttcattgaaaacgcctccggcaagacgatttacaacatcgccatggaacggctggccgcccccgcggcagggccgccccccgcgggcagcatcacgcccaacatcctgctctgcgacagcggcgtgaacgtggaagcccagcgcaccgtgctcccggaaatgccccacagcatcatcagcatcggcggcaccacgccgaaaacgggcatagaagcgggacgccctgtgtccaagctcatcctgcccgtcaccctgtacgtgaacgccaacatcctgccggaatgcaaggcgtccagaatcgccgccgaattcaagacgctgctggaaaatccggtcctgcttctcctgtagggctaccggcatggtccgctcttttccttgaacgttcccttccttccccctgtctcattaaccatgaaaaaagccgccatcctcgccgcccccggatttgaagaaatcgaactcatggctccgctggacatcctgcgccgcctgaactttgacgtgctcctcgccggcgtgcagtccgacaaggtggtcagcacccatgacgtgaccgtcaccacggacaccatgctggacaagctccatgccgacaagctggacgccctgatcctgcccggcggcgcaggcgcctgggtgctccgcgacacgccggaagtcatccacctggtcaaaaagatgcatgccgcgggcaagctggtggccgccatctgcgccgcccccatcgctctggcgaaagccggcctggtgaaggacaggaacgtcacggcctacccggcccaggacgtctaccgggaactcaatgaagccggagcccacatcgtgaaggatgaaaacgtggtgctggacggcaatatgctcaccgccaacggtcccggagccgccatgctcttcggctactgcatcggggaataccttggagaagacctccaggtagcccagctcaaggagcagatgtgctacacgggcctgtaggattccggaaagcattccggctccttcacggtctcataccacaccaaaaaaccgagggaagaagggttttccctctcacctcgccaggtgccttttcagggtataataagccccccggcgtcctttgcgggatgacatcaggcgggcacgcagggaagaaaagaaattgccctgaaaagggtagtccagcagaaggcggcaaaacgcctggtcccaccggtccagccaggagagggctttctccccgcccaccagttccaaccattctttccacccggacaggaggatttcccggtcttccggcggcgccttgaagaaggccccttctttcatgatgaagtgcctgcggatgaattccatgtagtagtccaccagcccgaagacagcgggggaatccagcaggccgtgccgctgccagaaacgggccacccggtccatgcccagcaggtccatacggaagtcgcccagcagcaaatcccgtccatacgtggcggagccgggacgttccctgcggtaatggtaaaaacggtccgacagggtccggagccggggagcgaagggcagcagcatcagcaggaaggccagatcctccccttccttcaagcctaccacaaaacggagggaatgttcttccaccaggcttctgcggaccagtttgttgtacacgggacccacgcaccggcaccaggcggaaccgcggcggaattgctccacccgttcctccggataaaattcatcatccggggaccagccgccctcatggacggccacaccgtctttttccacgaattcccggcaaccgcacaccacgacatccgcatcattcttttcagcggcgccaagcaggcgcgagaacatcctccggtccacccggtcatccgggtccacaaagcccacgtattttccctccgcggcatccagcccggcattccgggccgcggacactccggcgttggactggctgataacccggaggcgattgtctttttcccgccacctgtacagaagctccagcgtcccgtccgtggagccgtcatccacgcagatgatttccatgggacccagcgtctgctccgccaggccggacatgcattcgtccacgtagggcgctacgttgtaacaggggacaatgacggaaacggcagttttcatgataatccggataacaggagcttaagacggtggtaccgtccttttcttccgctgcatgccgacatcagggtactgtgaagacgcgcgccgggaccgagctttaccggttccgcacccagcaggcggcagaacgcgcggtcccacttgttcaggcctgcaaagccgggcccgatttccacgcctttcaaccatttgcggtaacgcgccgccagtcccctgcgttcctcttcatccagccgccggaagatttcctctgcggaggtgacgtgagccagcagataacgcttcatgatatgggccagccagccctgcctgacggcagattccagccagccgattttttcccagtaggccgtcacatattccagacggtccatgttcatggagtaaaaccatccgtcccggtcccagacgtcggaaagggatccggcccttttcctgcggtaaaagtataattgatcctgaatgaccgcgagccgtgacgcgtggggaagcgccgtcagccagaaaatgtcatcttccccgccgcggaaccccggtttcatgcgcaggccgttttcttcaaaaaaggaacgcctgtacaccttgttccataccaccacgtccatccggagccacacggactcaccgctgaaacaggattttttggcatcaggttcaaatccgggttccggcgcgtgcccggcgtcttccatcaccgtgccgtcttcttcggaaaaggaggtatatccgcaggccgccacctccgcaccatgccgctgcgcggtttccaccagccgggcatacatggaggtatccacgtaatcatccggatccacaaagccgatgtattcacccgccgccgcatccagccccgcattgcgcgcggaaaaggcgcccccgttttcctggtgaatcacccggatgcgggcgtccttttcagcccatccgcgcagcacgtccggcgtatcgtccgtggagccgtcgttgacgcagatgatttccaagtcttcccaggtctgccggaccaggctttccaggcattcatccagataaggagcaacgttgtagcagggcaaaataatggaaacagtaccatccatagagaaatcgtgagtatcattcagtttttcatgggaaaaaccagcggaaaccatgattcatgatgcccgcgccttttcccgcaacggctaccttacttcaacacgggcgttcccgcaagtcccaacgatgcgcagaatgttaagaaccagtccgccgggaagctatttcccaccgccgcaagaggaaagcttccctttaagcctgtagtaacgtccccgccgtccgcggcagcgggagagaagcttccaccacgcacgggacaggaagccgggatgttccggcggagaagccagcatccggcacagcgcaaagtcccatttgccgagagtccggaacgcctccgcttcccccgccagggcaaaccattcccggcatttgccgcgcaggcgcccccattcctcttcactcaactgcggcaggggctgccccggattcagcagccggaccagaagataatgcctcagagcccggagtacccagccgcgctccaggccggattccagccagccgcattttttccaatactccgtagcatgcagcagccgttccgccaccagcaggaggggacgttcctgcgcttccagcatctgggagacggaaccgcgcctccggcggcggtaccagtacagacggtccggaatgacggccaggcaggaggcatgagccagcgccatcagccataacacgtcgtcctccatggaccggaacgaggtttcaaaacgcaggccgtgccggttcagaaaatccctccggtacagtttgttgcacgtcaccacgtccatccgctcccaaacggaacccgcgcgggccatacttgactgcacttccttttccacgcccgcagcgggggaccagctcaattcctccagcacggaaccgtcaccgtcggaaaaactggtgtaaccgcaagccgtgacgtccgcgccatgcctgcgggattcctccaccagacgggcaaacatggcatgctccacatagtcgtccgggtccacaaagcccacatattcacccgcagccgtatccatcccgacgttgcgcgcggaggcctgccctccattttcacggtgaatgacgcggatgcggccatccctccgcgcccacgcatccagaagcgccggggtagcgtccgtggaaccgtcgttcacacagatgatttcaaggtcctgcaagctctggttcaccaggctttccaggcactcctccacatacggagctacgttataacagggaacgacgatggaaacggacatggggcgtcaggaatggtttttttctccggcggaagccaggagcaagcgaagagcggaatagcgccctcggcgccccctgcggagggaaagacgcttccaccagcggcggcgcagccagccgggacgttccgcaggctgttccagcaggcggcagaaggacttttcccatttgtccaggccccgcaaccggtccgcccctcccaccagggagaaccattcccggaattttccgtgcagccgggcccattcctccgcattcaggcgcggaagcggcttgtgcgccggcaccagatgcaccagcaggtagtaccacagggcgtgcagaacccagccgcgttccaggccggattccagccagccgcattttttccagtacgccgtggcatatagaaggcggtccgccacaagaggcagcggacaaccttcttcctcccatggcagggaaatagccccttctctctggcggcggtaccaatagagccggtccggaatgacggccagacgggaggcgtgggccagcaccatcagccagaaggcatcgtcctccccctgccggaagcggggctcaaagcggaggctgttcctttccaggaattccctcttgtaaagcttgttccatgccacggcggccatccttctccatacggcattttcctgaaaaacgcatgcctgtacattctcttccactccttcttccggtgacaggctccatttttccagtatggaaccgtcacggtcggaaaaaccggtatagccgcaggccgtcacatccgcatcactcctgcgggctttttccagcaggcggccatacatggagtgttccacgtaatcatccgggtccacaaagccgatatattccccgccagccagggccatgccggtattgcgcgccgcagaaaggccgccgttttcccgatccaccacccggatgcggccatccctttcagcccatgcgcgcaggatggctggggtatcgtccccggaaccgtcattcacgcaaatgatctcaaggtcccccagcgtctggagagttaggctttccatgcatttatccagataaggagctacattataacaggggacgatgatggaaacagccgcgctcataccaagaaaaccctatgtaaacggatttcaaatccggggtcaagggccgattttcataccaaggagcttacgttgcgtggcccttcctcgaggggaaaccgttttcccctggaaaaagccttccggaattacgcaacggaaacctggaccgcggcaagcctctcagccgttgaaatgcatgcattccgtcaggacgcactggctttcaggaaagagagttcgctgcctcccggtttggcttccggaagccgcaagcgtttacggcactccaaacggtacgggaatcattccatattaatccatgacggatttgaaattcgtatgatgcccaaacaaaatatgagcgttttcaccgccgggaatgtcccatgcagagaataacggaacgccggaacagggatgcccgttttccctgtttcaacagctcttccggaattcatctccgccatgaaaaacaagacctttctcccaactacctttataccgggattcccggcaggcaccggaaacgctttcagcttttcccattcttcttcatgacctgttgaattccttttatgccgactatctctcccttatccggcatggcggaacctcccgtttccgtcatgttcgccgtcacttcctcctggctcatcccgctggccgtggcgatacgctccctttgcgtgcattccgatccgcggcggaattatgaactctacatcgttcatcatggattggaggaagaacagatgaaggaactgggaaaagccgtttccggctatccccgcgtctcgctggagttttgcaggcttccggagaggctgcttcgcattctgcagcacagggattgcggacggttctcccctctcacgtatggacgcctgctggccgccgccctgttcccccggcacgacagggtggtttacctggacgtggacgtgctgctgaatggagacgtggccgaactttacgatgcggacctgcacggcgcgccgataggcgccgtccgggactgcgccgtcctgcaaagcatcagtacgggccgccttcccgaccatctggaatacatcagcggcatgggggtaacgaatccgcgcctgtactgcaataccggggtcatggtcatggacctggtccagatgagggagcaggaaacggaagacaggctgctgaggctgcttgaggcccatccggattcctttccgtacgtggaccaggacattatcaacattgtctttcacggccgcattgctccgctgcccctccgctggaattaccacttccagtttgagctgcaccatgcgggaatggcggacctcatctccggcaccgagtttgaagaagccccggccctgtttgaaagccgttcctggaagcttttccacctggtgggtgattacaagccgtggctgccgccggatatggaaaaaatctaccaccgcctgtatctcgccctctggtggccccttgcccggcaaactccggctttccgcagggagctgcgcgccctgtaccggcaattcacgcgcgccttccgttcccggctgcgccaccaccaatggagcctccccgtctctccgggccgggatttccggaaacgccgggagaaaatcaaaacccttcaacgccaactggccgtgtttgacggctcatggccctgattccatcccatcctttaacatcatgccctcctccctctccgccgcaccgcccgcagtcttccatgctgccgctgcgcctcctgccatagacgtcatgtttgccgtcacctccgcctggaccgtgtgcctggccgtcaccctgcattccctggcacgccattccaacccggaacggaactacaggctgtgggtggtccatgacgggctggaagaagaaaacatgcaggaactggacaaggccgtttccggttatccgaacgcaacccttcagttcatgaccattcccggcaagctggaacagatgctgcgccggagggacgtgaaacgcttttccgccctggcctacgcgcgcctgctggcacccagcctgttcccccggcattcccggattgtctatctggatgcggatacggtcctgtatgcggacgtagcggagctttacgatacggacctctgcggggcggccgtgggcgccgtacgggatacggcggtgctgagcagcctggtggcggggtatccgcggcgccagctccggaaacttcaacctttgggcctgcacgatcccttccactatttcaactccggcgtgctggtcctggacctggaccgaatgagggaggaggatgcggaagtccgcctgctccacgtcattgaagaacacaatgagctcctggaacatccggaccaggacgcgctgaatatcgtcttccaccggcagatttttccgctgcctgttgaatggaactaccatttccaatttgaactggggaaaaacggactggaagaggcctgcgcaggcacggaattcgccggggtttccaacatccacgccacatgctcctggaagcttttccacatgatcggctccaaaaagccctggctgttcccggaaaaatcagaggaatatatcgtgtctgcggccgtctggtggaagccggccatggaaacggcctcccttcggccccatctgtcccaattgctggaggaattcacgcaatggacgcgacggcaattgcgccacaatcaatggcacctgccgttctccttcgggaacggcttccggaaacgcaaggccagaatcaacctgctgaaacgcctgctgcgcgtctttgaaggcgtatagccccgccggcggcaacaggcgttcgagaagagccgcagtttccaatcactccggcagtttgatgatttcccccgttttaggttcccggtctttcagagccggattcaggcggataatttccccggcgcgctttccgtccttcaaccggctttcagcgatggacgcccgggtttccccggccttcacctggtaatcccgcgctccttctgccgggcacgcctgtacgtacgccattttccctacattcaccacctggtcccggccattcaggcggaataccagcgttttccgcttttcctgcggacggccgtaatccgtgtacacttccgcgtacagagtaacgggagccagcattttctgcgaccgggtgccgtaataatgcgtctggatcagatagggaccgggaagagccttgcgcaccaggtattcttccggcccgtagccctgcgtcacgtcacgggacaaatggccgccatgagtggtcagccgatgggagtaatagcatttttctccggtgatgtccgtgacccaaaggtccatgtcagacgcatccgtgtcccagttgatgaccacacgcaaatcagcctccaccggctggagaaaggcagggtccagccccccggtatccagcttcactcccgccgccctgctccgggaaacgagccggttcagttccaccagcacaatctgctccacgccggtgaagcggcggggcatcgggcgttccagcacctcccggtacatgtcgaacgccttttgggcttcccccagttcatccagcaccagcgccagatcccggtaggactggggttcttccggaaacagcgtttttacggtttcaaaaatgaacctggcttgccggagttctcccatgtaacgcagcttgtagcccagcatgcgcagcagggaacggttttccagttccagctccgccaggttggacagaatctggacagccagcgccttgtcccccttcccggcaaaccagtcagagcagtccatgtaaaaaccggggctgtccccatacttttccttgagtttcatatagaccgcaaaaggccggtcagccgcatccagagccgccagatacggagccttggagtcccacgccttcacgttcatgacgggggaagaaccggcatcccgttcccgcgcctttagtccatttaatgtttctccccctcccaggaacagggaccctaccacctcttgattttccggagcggaattctcgttccccagcagatccggggaggcggagtccggagaactaccggcttctgcattaaaacttccggacgccctgatgacagcaccggaatctccggatatattgttaccttgaactataacaggcgccggagcggattccccagaattttcatcctccggagaggatccggccggacgctcccagagagaatccacttccgccagcatggcgcttcttctttcatcataagcggcggagtaataggcagtttttctgcgggccacagtctccgcaccccttcttgccgaaacattttccggagccttttccaatatcctgttaaacagggaaagggccttatcgtaatccccaaggtcataaaagccgtaggtcaggcggaggcttcccgctatgtccgcaggctccctgtccagttccctgttcaagtttgctcttgcctcagccagctccctgtcacgggcagcgttttccccagaggctttttcagcctgtgcttctttttcccggaggcgcctttccatgaccgtgacgcccttcaaggccgtccggttattacgctcatccttcaatactttccggtagatttccagcgcctcccggtcattgccccggcacgtatgaatcaaggcctgtttcaaccggtcatctttcaagacgctttccatctcttccggattgaaaaattcctttgcgtaccatttctgcatttctttccaggaagcaaggcacgctttcaagcggtttaatcttgcggtctcttcagccatgtcctccttccgtccgcgtttcagcatcctcttgtcatattccgcccgcaattctgaagcggaagcgggaggacgcacaccatatttcaggtattgctccagggagtccagcaccagcagagaggtaccgggcgtcacgattccatattccattcccaggttccccacagcttcatccgtcacggcagagggtggacggcagagaagttcctggagccttgcctgggcatataaggccctcagcatggttccgggcgtccccccggaggcatccgccgccacgggaatttccactccggcaacctccaccgtcccgcggtaagaacccggctccagttccgccagcaaaaggacggaatccgatggcattccaggaatttcataccttgaaaacgccctccagggcatattccccctgtcaataatgtaacggatggaaatttcccccctgacgaggcgctccatcgcctgctccgccgtttgactggccaggtcaatcacaggaatgcccatccggatgaacgtattcgcatccttgcgcggtgtcaccatcagggcgaaggttttagcggagctagtctcccgcttttccggcacggggctgaaattgataaatccatcactgacaaccaggcagtccgacgccccggaacaagcgctcagcttttcccgaacagcgctccagtcacacgtggccccgtcatagtccagagccagcagttcgcgggccagctcgtccagattgtccggagcgacctcgaacgtttttgaaggcatgatccggtcccggaagacagtcaggttgatgcgggtttgccgcccctgcgttctgccgcaagcaagatatcgtttcagaaaatccaggaatttccggacatccgctcctttcatggaaccggaagcgtcccaaagcagctctatcgtgggcgcggcttccacgccgctctttccgtccgtccgctcaggccggggaataatcacggcggcatagtccctgccgtcaaaggactccacaaataccttcgctctccccgcatcttttccctgcgcacgcggcagggagatgaacaggtcttccgtcagggacagacccttccattccttttccgccaggaaggcgctgcgccaatccttgaattccacgttgtccagcggggaggaaacgacaacgggcttccggccggcgaacacttccaccctcagcttgagggaatccagtttctccttgaaattcatcggaagctgcagggacggcgctcctgcggcatccacgggaagaaccgtggaatagcgcagccgcacagtgcgggttcctcccgcaggaatgggatatacgcgcgtcttgaacatgttgccgccggaccattccaccagtccgggatcaacctgtttgcgcacctcttcttcaaacgccacgcgcgccttttgcctgggtaccggcacgccatccaccatgcggccgttgatgtccagcgcatacccctgtacgatggctccagccgggagagggtacaccaattccccttccatcacacgcgtgttggggttgtgaaaaaccagcgtcacttccgtttccgccaggaaatccatcacgcgagacttgatttccgcccgggaaatggaaacggggctctcatccgcgcggcattccactttcatggaaggaggagggagaacaacggaacgcaaggaagccgtctgggccagagaaacgcagcaggcaagaatgcacaggcagagagaatatgtaaatttcatcattctagggggggttggggagagatgggaaaaggcgggttttcccatctccctcccttcctaccacaaggcacagtccagggcaaactatttgttgtaaacggctcccgcatgattgcccgcaaaagggccaatcccccgggaggaaaggaatctgcccttccccgttcaaaagtggaacctgacggcggcaaaccaggtccatccgctgaagcacctggcgccttccggcgctccgctggtcgtcgtatattccccccctgccatcaatttcagcatgtccgggtcttccgggaaaaaataataattcaggccgaagtaaaaggagttcatcgtgctgacccatttgggataggtggtcaccgcgggaacatagcgggcgtacattttcacggcgtcccgcccatgggagagctggtagcggaacacgccttccagatgcggggaaaacctgtaggaaggcaataccgccaggccgtaaacattctctcccagagaggtccccaccacgcggaagccggacatgagttccgtcaccatggaaaatttcccccgggacatgacccagtccaccgccgccacatcccgggcgccaagcccggagtaataggaatcctccggcagggagcgtcccgcgtaatgggtgaagttgtgggcatacgtcagccagacgcggcttttctcccccggcagaaagccgcgggcgtccagatggacggaggccttggcaaaggcattgtccgccgtattaaacctgatttcatgcgccaggctgtcgctggtgtcgttcaggaagacggaagcctcccaccccacgggcacgtcctgccgcgggttttccagcacaacgccccaactggagatggtcccgagctggttgaccaggtcggaccgttctagggtcttgagttcactggccgtctcccggaattccgccgtcatcttggaagtgattttcccgacgcgcgcaaagaaggagggattgaccttgtatttcaggtagagttcaaagatgctccagtccgtcttcgttcttctccagcggccatcctccaccttgtacatgccgtccagctcccccatgttggtcaaactgtgcagcgtcaggcggtttttgaagaaaacggcttcaaaccctatctggagcctccgccattcgttttccctgccatgagagcccttgcggaaccggttggctccggaaggggagacctgagccccctggtactgccccgtcagcagcagcttgaactggttcaggaactccgcgtccttgttgtcgtagagatagggcatcttcttcagacgggagtacaggccatcctccgccggatgggaaggagcccttacggaggctccggggcccgcaggcccggacgcctgccatgccgaaccttccgcccatacagagccgtaccccccagccagcgcgatcaggaaaaaacagcatacgcgggcaaacatgtctcatgaaaagacatgttccggacccctacgtgttgaaggtatgccggaggatgccacgcatgcggcccaatgctccggaccgggttaatgcggcgtgtggggctccagcatctgctggcgttcccgttccttgtccttggccaggcggcgggcctccttggtcaggtactgctgcaaacggaaggctttctggccctttttccgaacgacgtgctcggaagtgccgtcaggcaaaatattgcaggcctgcacgttgtccctgaaacaggcgtccaggatggatttgaggcggcgcgccagcttcccgttggtgacgggcaccatgagctccaccctcttgtccagattgcgggtcatccagtccgcgctggcgatgaagagctggtgattgccgccgtggtggaagaagaagatgcgcgcgtgctccagatagcggtccacaatgctgaccacgcggatcaccttgccgttgggccgggggcccgttttcaggcagcagatgccgcgcacgttcagttcaatgtccaccccggcgtccgcggccctgtacagggcgtcaatgatttccacatcctgaaggctgttcatcttggcggagatgcgggccggttccccctgccgtgcgcgctccgcctccccttcaatgagttcaatgaggcgagccttcatcagcaccggcgaggggtacagcttgcggaagcgcatgagcttggtacgtcccgttacggagttgaagaactgggaggcgtccgcccccagctggtcgtcgcaggtgaggtaggaaatgtccgtgtaaatcttggcggttgtttcattgtagttccccgtgccgaagtggcagtaacgccgcagcatgccctgctcccggcgcaccaccaggcatatcttggcatgggttttcaggcccttgacgccgtagaccacctgcacgccggaacgctgcagttcctccgccttttccaggttgcgggcttcgtcaaaccgggctttcagttccaccagcgccgtcacttgcttgccgctttccgccgcctttttcaaggcggctacgatgcgggagtttttggcggtccggtacaggacctgcttgatggcgatgacgtccgggtcttccgcggcttcctccaccaggcgcaggacgggttcaaagctttcatagggatggttgagcaggatgtctccgttggcgatgttttcaaagatgctgacggcagggtccacggagggtgacggctgcggggaccattgctccactttcaattggtcattgccgggggcaaaggccatttccatgaagtcggaaagcatcagggggcccttgaggtcatacgtttcctccttccccgcgccgacgatctgcatgatcctgtcatgcagggggacgggagcggaggattctatttccagcctcacgcattcggagaatttgcgggccacaagcacttcctccatttcatccgccaggtccagggcgtcctcctcctgcacggcaatgtccccattgcgcgtgacgcggaataccgcggcggagagaacgatttcaccgggaaaaacggtgccgatgcattcccggaccaggtcctccagcatcacgtagcgttccgtttccgcagaagggacgggcacgcgccgcggcaggccgtccggcagggccactacgctggcgcggacctccccggtttcattgtcccgcagttccacgcccatcagcagcttgagggacggcagcgcgggagcctccggcgcatccatgtccagcggcgtcagcagcgggaatatctggttgttgaagtattgctccagcgtcagcttctgggaagtgctgaggtcctccatggccagcggattgatgccgttgatttccatccacggcaggatttcttcatgaaacaggcggtactggtcctcaatcatgcggcccacgcgggtgcggatgtccttgagctggcgggttggggtcagcccggaaatgtccttcacgcgggagccggaatgccgcagcatctggaggccgcccacgcgcaccatgaagaactcgtccaggttggaggcggtaatagccaggaacttcaggcgttccagcaggggaaggtccgttctcacggcctggtccagcacgcgctggttgaattccagccaggagagctctctgttgatgtattcgttagacatggagaaaataagggatggaagtttcttgaatcggcctaccgctggggcaccagcatgacgtcataaccgaagatgtccgcaaacaggtcgcccttcagccgcagcgccaggtcttccacggcggtttcacgcacgccctggagctccagctccagcatccggccccggatgcgcgcccggacgccgttcacgcgctgggcatggccgcgttccagggcgtccgccacgcgcaggatggcagccatcttggctacgcgcatgcggtccgtcagctccagctccccgtacatggggtcggaattggcgggcacctcatgccggtggtagcgggccagcagggcgatcgtttccacgtcgtcccgggaaaggccgaagatttcactgttcaggatgatgtactgggaatggagctggtggtcctgctggctgatgaaagaccccacctcatgcaggatggaggccacctccagcagcagccggtcgtgctcggaaaggcggtgcaggtcctggagctggtcaaacatttccatgcacaggcgcgccacatgctcgcggtgccccttgtccgccttgtacctgtccgctagaatcccggcgaagtggagcacctccgcctccaggtcccccggatgctgttccgcccggatcaggctgcttgagaattcctcgtcatagccgcttccggggatgatcacgtcattcaggttcaggctgcgggcaatcatctccgtcatcagtacggcgggcagaagggaatccaccccggcaaagtccgccccgtaaacgttcatgcgctgctccagggtggtgcgggacatccgttccgcttccgccaccagggcggaacacgccaccttgccttccggcgtggggtccaggcggtcacggagctgctgcatctcctggccgatgacgataagccccgcgaggcccttgacgccgccgtaatccaggcaaatctggtccacctgcccgcgcatgtgctcccgcagcagggaaagttccgccacatcgtccccgtattctatttctccgacggcctcgcccgtgcggtgcgtccccagccggtagcaggaatagcgcacgatgcgccccttctggaacaggagcacgcgggtattgcccggccccgtatggaccacgagcacctttttcttgctgaatcccgggtattgtgccagcgtttcctgcaccttcacgtaaatgaggcgcgtcatcttgccgtcgtcaatccggcgtccccgcaggccgtgggccacgtgcatgcggttgacgaacacgtccacattgtccgcctcggaaatgatgttggagatcatgagccggacggaaagcctgctgccggttccgtattccttgagaatttccagatagtctccgatgatttgcacgcagcggtccatggtatgccgggaaatgcggtggaaacggaagatgtcccgcgccatgggcacgggctgctggagaaagtccagcaggcgaatcctgtcctgaaccacctcagccaccatcaggctcatggagcccggccccaggtagatcaccgcctgcgttgataattccgaatcctgaacctgctcgccttgaatcattgccataccatgtattgtttcccagccgtggagcaagaatggcggcgtgacaaaagcgccatccccgcccgttccagcaaggggcagaataaggaatttgccttttgacggcaagagataagcgcggctccttttccggtccggaggaacggccctgcagggcggctatttcccgtaggctcccagtaggggaaccaggcgcggggcaaaccttttcatgcagaagaagagccccgccagcacggcgaagatgaccggaaccaggcagagccacaggacgtcccaggcctcccccttccacgtaatccagccgctttcacgcagcaggatgatgacgatgtagtgcgtgccgaagatgaagaagcacgccggggccagccccgccacccatctggccgcgcgcggaaaccactccgtgaacaggatggccagggacatcagccccagcattcccagcgcaataagcatggagttgtgctggtcccggtggcccaccagccaccaggtgagcgcgagcgtggcaagcaggaacggcaccgcataccggcgcacggattccgtcaggaacggaagggagtaacgggatacgtacatccccaccaggaaaaagcccaggctgttggcgataggatagtcatgatccgccaggtccagcgcaaagtagttcagggagagcatgatgattcccacccagagcatgtagttccccatgcggtgcaggaggggcgctacagcggtataaatgatgatgtcgcgcagaaaccacatgggggcgtccaccgggtgcccggcaatgcccaggcagcggccgaacgccgcgagggcggaccagaagccgctgcccgcctcccccttcagccatgcatacatgggctggtaggaggcgtagtattcatgaaggggggaccagccgatcagaacggccgccgccagcccccacaccaggtacgggcggagaagaaaccagctccgcttccacaggaaaaggcgccccccgtccagcggaccgaacgaaccgcgccccacaaagtaacccgccgccagcaggaaaaagggagtgcgcgccgccaggaattccgcccatatccaccggtaaagctccgccgaatagaaggccatgtggtttgcaataatcaggatgcaggcaatcacacgggccacatccacccacaccatccggtgcgtggccgtcctctccagaattacgggagcgggaatctgggcgtccggcggcgtcattcccttgcggggctggagttacaaaggggcgatgccgagctgctccggcaacgcgatgcggggacgctccgtcacaatcaggggagccccgtccgtcacgatgaccgtgtgttcaaagtgggcggatggcttgccgtccgccgtgacgaccgtccagccgtcatccagaatcttgactgaaggcctgccggcgttcaccatcggttcgatagccagcgccatgccctttttcaggcgcggaagcttgtaatgggggcggtagttgggaacctggggctcttcatgcagatggcggcctatgccatggcctacaaagtccctgaccacggtgtacccgcggggacgcacaaagccctccacagccgcgcagacgtccgccagcagcgcgccgggcctcaccagttcaatggcacggaacagggattcctccgtcacggccagcaggcgcagcttttccgggtccaccatgcccacgggcacggtcatggcgttgtctccatgccagccgtccacaatggcgcccacgtccaggctcacgatatccccgttctggatgcggcgcggaccgccgctgccgtgcaccacttcctcattgatggaaatgcagagctggccggggaacccgcggtactggtagaaggagttgcctaccttgtgcttcttgaagatttcacgcgcgatgtcgtctatttcccgcgtggtgcggcccgcctggacctcggctccgatctccatcaagatttccgccgttacagctccggccttttgcatcttggcaacctcgccgggagacttgatgtggattcgttctgccatggaattcgtctttctattgccggtattcttccagcttgcgggccaggtcgcgggaaacctcggcaggttcccgttcctcggttaccgtcattttaaccaccaggccgcgggcttcgtagtacctggctacgggcagcgtcatggcttcaaagtctttccagcggcgggcgaaggcctccatgttgtcatccttgcgggagaccattttgcctccgcatttggagcattcctcttccgacgtctgcaccacatggccgcacgtggagcattcccggcggtgcatgatgcgctgttcaatgagttcccgggctacgtccatccagacgaccacgtccacggaggttccgcgctgggtcaggaaatggtccagggcttccgcctgcgcaaccgtgcggggatagccgtccagcagccacgcgtcattgtccatttccgaaagccagccgcgcaccatgtcgttgacgatctcgtccggaaccagcatggccttgtccatatagcccagggctttccgtcccagctccgtgcaggattccacttcccgccgcagcagggagccggtgctcagggagttcaggttgaaagtatcagccagaaaccggccctgggttcctttgccggatgcgggaggcccaaccaggatgaaatgcttgagatccttcatgtctttactttcggaagagggaatggcgttccttactgcatggcattgtaggcgatggcaccagccagcaccagcagggcgatgacgacccacatgacggtgaccgtgcggctgcctgcggcggctccggtaccctggatgtgaccgtatttgcccttgagcttgccttttttcaggaagccgtcgtagttgcgggagagaagagtggtttccacctggcgcatcatgtcaagcagcacgccaaccagaatcagaaggctggtgcccccgaagaattgggtgaccaggtaggggatgctgcccccgatgttcagcagggaaggcaggaagtagatgagggtcaggaatgcggaaccggcaaaggtcagcctctgcatggtctggtccaggaaaagggcggtgggaggtccggggcggatgccggggatgtagccgccgttgcgcttcaggtcttccgcgatctgggagggctggaacatggtagccacccagaagtaggagaagaagaagatcatgaggccggaaatgatgtagtagccggaggaagcggggttcatccagtcattcatcttggtggcgatccactgcagcgtggtgttgtagtgggcgatctgggagaagagcacctgcggaagggacaggatggccgtggcgaagatgacgggcatcacgccggagtagttgagcttgagcggcaggtactgagtggcgccgttgaacattttattgcccatgacccgtttggcgtattgcacgggtatgcgccgctgggcctgcgttaccgtgacgacgagcgccaccacgataatcaggaaggcgatcagggccacgagcagcatggcgcccatcgggacgaccgcgccgtccttgtacaccagcgttttccaggccagggtcaccgcgcccggaagggcatggataatgttgacggaaataatgagggagacgccgttgccgacgccgcgctccgtaatctggtcgcctatccacatcaggaacatggtgcccgccaccatgatgagcaccgtcatcagggcaaactgcatgcctgggtcaatgacgagctggcagtccggagggatattgaggcccacggctttcaaacggtccggatgttccaatgtaccgaccaggaaccagccctgcacaatggcgatgacgatggcaatggcgcgcgtccatttggtcatcttctggcggccgccctcttcccgcaccatcttggcccactggggaaccaccgcggaaaggagctgggtcatgatggaagcggagatgtagggcatgatgcccagcgcaaaaatgccgcactgctgcaggccgccgccggaaaagatggtcagcacggtagccaggcccgcaccggggccgctggcattcgcggaggcttcaatcactttctgcagctccatgacgtcaatgcccggcaggggtatctgtacccccaggcggacgacgacgatcatcgccagtgtgaacaaaatccggtgcctgagctccggtactttcatggagtttgcaaatgcggatatcatggtcctgtaatatagaagttgtcgcgcagcttggcttgcatgtcacggcggcttgtacccggggcatccatggggaccgcaacagtaaacacaatgatgcgaaccgggtcaagctgcatgacccggttcgccaaatgtgattaggcttcgctgagcacggtgacggtgccaccggcctgagtcaccttttcgcgggcgctggcgctcacgaagtccacgactacgttcaggcttttggtcagggtgccgttgccgagaagtttcacggcgtcacagggaccttgaacgagcttggctgcacgcagggtgttttcatcaaccgtagcgccggcttcaaacacgcgttcgagctgggagaggttgacgatgaggattttgtcctggaagcgggtgttgttgaaccccttcttgggcagacggcggtgaaggggcatctggccgccttcaaatcccgggcggatggagccgccggaacgggccttctggcccttgttgcctttgccgcaggtcttgccgagaccggagctttccccgttgccgaggcgcttcctgcggtgcttggctcccggattgggcttaatcgtatgaagctgtaacatgttatttacaatggttggatttcgtggaggcggcggcacggggcggccgcctcctggtcagattagatggccttttccttcttcttgccgcggtcggcaaggacctggtcgctcgtgcgcagggaagcgagagcctgcagggtagccttcaccacgttggcatggttggaggaaccgagggatttggcaacgatgtcacgcacgccggctgcttccagcacggcacggatggtgttgccggcaatgaggccggtaccgggggaggcgggcttcaggagcaccttgccgccgccgaattcggagtagacttcatgcggaatcgtgccgttggcgatggagaccgggcgaagctggcgcttggcggcttccgtagccttgcggatggcgtctgccacttcattggccttgccgaagccgaagcctacgcggccttccatgtcgccgctcacgacgagggcggagaaggagaagcggcggccgcccttgacgaccttggcgcaacggttgatgaacacaaccttttcagcgagctgggggccttcttccacgggagcttcagcctggaggccacggcgtccgtcacggcggggaccacggggtccgcggccattctggccgtcacggcggggtccgcgggggccgcggaagtcgcggccgccctgtgcgggttgctgcgcttgagcgggagcggcggcttccgtagcaggagcagtgttttccgtttcgttattcatttagggaatctttcaattagaatttcaaaccagtttcgcgggcggcatcggccagggccttcaccttgccgcagaacttgaagccaccgcggtcgaagacgacttcagtgacattggcggccttcgcacgttcaccaatcaggttgcctaccttggtggcagaggcgcggttggcgagcttggaaggatcggcgatggatgcatcggccgtggaagcggagcagatggtcttgcccaccgtatcgtcgatgatctgggcatagacgtgacggttggagaaatagacagccaggcgggggcgggaagccgttccggagagctttctgcggatgcggcggcgaaccttggagcggatggctttgcgattgatagtactcatcgtgtataaatatgttgtaatagttattacctgaattacttaccgacgctcttgccttccttgcggcggataacttcaccggcgaagcgcacgcccttgcccttgtagggttccgggggatagtacgcacggacttcagcggcaaactggcctacgacctgtttgtcgatgccttcgaccgtcactttcgtgttttcggtcacggtcaccttgaggccttcgggaatcacctggttgatcggatgggacttgcccaggttcaggtccaggatgttgcccttcacggcggcgcggaaaccgacgccgacgatttcaaggtttttgacgaagccttcggaaacgccgatgaccatgttgttcaacagggaacggttcgtgccgtgcagggcgcgaagctggcggctttcgccagcgcggtcaacggaaagctgattgccttcaacggaggcggtgatgccttccggaagcgtccaggaaagcttgcctttggggccttccacctgaacggaagagccgttaacctttaccgttaccttgtccggcaatgtgatggattttttaccaactcgggacatatgtttaggaaatgttaatggttaccatacaagggcgagaagttcgccgccgatgctctgcttgcgcgcctgcgcaccggtcatcacaccacgggaggtggagacgatggcaatgccaagcccactgagaacgcggggaatgtcctcggaagaaacgtactggcggcggcccggcttggagctgcgcttcacgtcggtgacgaccggcttgccctggggggttaatttggtcttcaccttgatttgcttcttggttccttcaccggtcacttcatagttccagatgtagccttcttcctgcagaatccgggcgatttccaccttgatgttggagcagggagcggtaaattcctcgttgccggccaggctggcgtttttcaggcgggtgaggaagtcggaaatggggtcacttaatacggccatggtaagaaatagttaggcgttagcggtttgagtttcttcggccttcttcggttcacgcatgggaacgcccagaccgcgaagcaggtcgcggccttcatcgtccgtaggagcggaagtcacgaaaatgatgtcgaagccgatctgacgcttgatctggtcaagttcgatttcggggaagatggactggtcggagataccgatggcatagttcccgttgccgtcaaaggacttgtagggaaggccgcggaagtcgcggatgttcggagccgtcacgttgatgaagcggtccaggaattcccacatgcgggcgccgcgcagcgttacgcgggctcccagaggttcgccttcacgcaccttgaagttggccacgctcttgcgggcgaaggtgacggacggcttttgtccggtaattttagcgatttcattgacggcatcttccacggcctgtttgcggtccgggtgcttgcccatgcaggaggtgacaacgatcttctccaggcggggaatctgatgcacgttcttgtatgcatgcttcgcttgaaggccgggaacgaccttttcacggtagtatgtttgcagtgttggtgtactcattgttttagcgggtcagctctttattaatgatttatgtggcttaagcgcagggtcaggccggaggcctagcctacttttttcacgttggagatgtgaatcgggccgttaatctcctgaatgccgccttccgggttctgttccgtcgggcgcacagcctttttcagggtgcggacgccttctacgatgacagtacctttggaagcattcacggcgagaacggtgccgcgcttgcccttgtggttacgtccggcgatgatttctacttcatcaccttttttcacgtgggtcttcatatatgactatttcttacgcgtttatgcgattaagatctaccacccccttggtggtagggcaggaagagtattataggataggccttttcgtcaagcccgcatcctaaaaaaatcgttttaccgcccctgcgccaatgcggaacgatcaatggagaagcgccccggcctgcaaaagacgccgggcccggtttccgaaccgccggaacggttttattcatcatccgtaggaatctccgctccctgccagcgcagcttggccctcaagagagcgccgaagttctgtttgcggagatgaaccagggagagggtttccggagctttccggatcacgaggctttctcccacttcaatgggataggcggaacggccgtccagggaataaaccatggaatcaaagcggccgcggcgctcgcggggccgcaagcgtatggtcatggtgtccggaagcaccacggaacggttggtcaggctgtgcgggcagatgggggtgacgcacactacgcgggacatgggccataccagcggccctccggcggaaagggagtacgccgtggagccagtgggggtggagaccagaacgccgtccgcatggtagcggttcagcagttctccgtctatctcggcatccaggtccaccatcttgccggactgggcgcggatgagggagacttcattcagcgccagcttgcggggagggactgcgataccgtccacgcccatccggaccacctccagcatggagcgctcgtccgtcaggaaagaaccctcctggagcgcgtacgccagcagcggcagctcctgtacggaacaggtggtcatgaatcccaggcgccccaggttcacgcccgccaggggcacgtggtgcgcagccgccagagaggagacggtcagcatggtgccgtccccgccgaaggttaccagcatgctgcaccggacgatggcctgttccagggcatccggcgtctcaatgacgcaggaccccagcccgtggcgggaaagctcgcggcgcatgatgcgcagcgcttcccccagtcccggtttttccgccaacgcgaccaggccgattaccttggaaggattcatgcgggcaagcatactgcattttcccgcgccgctcaactggtaaaccacggcagggggaaagattccttccgggcatccctatccattaaatttcaattcctgtttcttttttgttatacaagattataaacatgtgttaaagataaaaagcgtgaattggtccctccccgtcctgctgctttttctgatgccgggctgctccactacggagaagtgcggccagaaaacggccccggccgtacaggcgacagaggcgcatgtaaaaaatgcgccctaccgggtgagggggaaaagatatactcccatgagcgtcgcagacgccctgcaatacagtgaaaccggctatgcctcctggtatggcgggaaaggacgcagcatgaagacatcctccggagagtacatcaatccccagcggtccatgacggcggcccacaaaaccctgccgatgccgtgcaaggtgaaagtcacctgcctggcaacgggcaaatcagccgtcgtcaggatcaacaaccgaggcccctttcacagcaaccgcctgatagacctgaccgcgtccgccgcaagccgcatcggccagcaccggaacgtgctggtgcaccgcctgatctgccgcggcaccattgaggaccgcattgacgccatgctgacggaaaagcgccgcatggcggacgacctgttctccggcggcccggaacagtggctcatgaacatgagcgcagaagaacttaaggacgttctttgcaagagctgaaccaatttcatctcctgaaggagcggttgatgaaaatcaattcaacggggagataagaaagggaacagaaaaatgcattaacacgcattttttcctctctgacgagggaaagtcagaaaatccggttttcttgatgagccctgtttttggcatccggccgcccatgccggagaatttgccggaaatcataaaaacaggggcgtacaccatcacggcattccacctgtttgcggcagccttggaacaatcccatgacgaaatctttcaccgtgcattccgcgtccattgtgtctcacccatattagccatgcaaagttgcaccggggaaactgattcgcgagcttccaggaatgccttatctagcagtaaagcttataatttatttattatgaattagaaaaatatttttaccacccaattcctttacgatggaataacggcaaaacatctaccgggattatcaattttcattgacaatttatcatttcaatttcataggtgataatatgatgatgattccaaaaatattgtgctgtttttcgcttgttttgggcatcctcgttggagcggcacatgccaaacaagcaaaatgcggctatgagctcataaatatttcagagccgacagcagagctggttgaaccggttaagggaaaatcaatgaaattcaaggttcatgcgactgccatggcaacttacactcacaaggacggctccactgtttcagagatcgtgaatctggatcagggtgccactgttgtcgtggatgtctcggaagacctgccctggaatgagagagcaaaagaaaaggcgattcttcttttacaccaaaaagccctttccagaagaatggaattatgcagagacaacggatgcagcaaataatggcggtaacacaataaccatacacattaacaataacatagggaaatgaagatgaaaatattattaaaaataaccattttgaccataggatgcagcgccatgctggccatcaatccatcatttggagcggacgaagcacaaaaacaggccgccggggccgtccagtttcctgccggttcctataaaaatcccgccgtgcttgatcttaaaggggtcaaggattacagcatgctggaatcggcgcgagatgaatacctcagaaaacattacgacggttaccgtgttctgggtgaaggattcaccatgattggaggccgctacatccttaccgtcagcttgacgaatgatgaggacgaaaacaaggtaaacaatcttaagctggtctatttcgacatgactgatgcgtataagaaattaggcaaatcaaaagacaggcagacgcgcgagaaaataaaggaattgaagaataatcaccaccccatgagtgaaaaggaactcatggaaaaactggaacgggggacgacggaaaaaaccggaaaataagataaatgccgtctggccccggttttcattttaatccctttctatttccatcgtgagggattttttactggaatgactccgcgcgctggcttgttaaatatagagcctgtattttctgataagccgtagttttgttttttcaggaatgcgactcgcaggcatcatttccatgatgcctgcgagtcaaaccctgtacatctgcttttccagcgtcttctgctatcttccttctcaggaaaccacggccagcggcgcggtggttttccagtctccgcgggtaaagtccgggaactccacgggcatgccgccctgcgcgatggaatgagccgtcaacggcagcagggaagaccaggcggctccttcgtaaatattctggtccatcggctctccgttccggaggcattccacgatgcgggaaagcatcacgaagtccatgccgccgtggccgcccattttcgtagccagattcccgatgcgtttccagagcggatggtcgtatttctcgtaaatggcggccagcttctcccggccttcaatccattcgtgatagttgccgttgcccagcttttcacccgccacgcgggtcgggaagccggccagggtgccttcggttccctggatcaggttggcgcgggaatagggccggggggacgtttcatccagttggacgacaatagtgcgccccagttgcgtcttgacgatggccgtgttcatgtccccgcagatgaagggggtattgttccagcggtggtccgcgggaaggtgttttttggcgtaggcattgcgcccgagcgcaggggaggcgaacgcagccacccggctgaaatggtcttctccgcgcgccaggttcatgtactgcgccacggggcccagtccatgggtggggtacaggttgccgttgatccgggtatggtattcaggccgccaggccccttccccgcgcgtgtcccccaactgcgtcaccaggcagtggatatatgcggcctccccgtggagcagatcgccgatgaccccctgccggaccatgttcaggaacataagctcgtcccggccgtagttgacgttttccatcatcatgcagtgcttccgggtggcctcgctggtgtccaccagattccagagttcttccagggagacggccagcggaacttccacaaaggcgtgcgcgccgtgcttcatgctgtcgcaggcgattccggcatgggtactccagtccgtgctgatgatgacagcgtccggtttcagctccttcagcatggtcaggtattccgtgtccccgccggaataactcagcgggcttttccccatcttggaaagcacgcggtccacgccgcgcttggccaggtcttccttcaaatcacatacgcccacgatttccaccccgtccatcacgcacatttgagccagatgggaaaagccgcggccgcccacgccgatgaaggcaagcctgatgcgggccagcccgggagccttgaagccccccatgtacatggagccggaaggccgcggagacgcctgggcgccggatttccagaggctgtccccggcagggatttccagggcctgcccggggagaacgtttccggcggcagccgctccggccgcgagccccagggatttgagaaattgtctgcgtgatgaaaaaatagacatgatttgaaagtatggcttcaaggaagattacgcctcccgtgccgcggatttatcatcattcccgtcccggaggaaaaaagctccggatggctgattttaaggtttgcaaaatccggcggaacttccactatgagataaacttctgcctctaaccaccttcaatttatgcgttaccttcttcttatcctgttgctcgccggcggctattacggctgggattattaccaaaccggcctcgtgcccaggcatgaagccatcaaagccatggagcaggagccttatccggagctggatgcggcccaggcccgttttgacgaggcggcggaacttcacgaacagcaggcggcacgcctccaggcggccatccagaggaaggaagaggccatccgcaagtattgggatgcccagatggagaagatcgaccaggcaaacgccgggaaaaagtccgtgcccgccgtgaagggaaggcccaatgcccggagcgcggaagcccggatagccaatctcctggaacaatatgaccgccgcgtcgcggacgtggaggagctcaaaggcaagcgggacaccaccaggcagcagttggacaacgcccggaaccggctccaggaacaaatacgccaggtggaaacccggctggacatcaaccgcatccagcgcgcggaggcgtccaatacgaagagcaaggatttcaaggtgacggagagtcgggcggacctgctcaagctccaggccagcctgccgcaggagctggaccgcatcacccgcaagggggaagccatgctgagtgaccagacggcggcctacgagaaggccaaaagggagctggccctgttccagaacaaggtggacagacagatcgccagtctccgggatgccatgaactcccccctggcggaagagtatgatgagacggaaatcctttcggaagaccccgagttccgcaccatgatcgccccttacgaccaggccgtcagccatgaggaaacgcttgtcatgcggacggaggcggacgtggaggagcaggccaaggtcctgcacgggctgcagcgcatcagggacgggaaaattgaaggggagcgcagccagctcaggcaggaggaagagattttcttcacggccgccgccgtcatcggcgtggttctgctaatctccattttgctctcctttaccagaaggagatgatgcctttgaaggttgacactgcaccgcaaacctagtttactgtctgggccgccgggaaccccgtggaggcacgactggcaaaccccgccaggaccgagaggtagcaacggtagcttgttcgtgtttgccgcgtccgttcccggcggtattttattgacgcccccttccataccgggattgaacgggagccttcccgtggtagaataccgcccatgaacgtgtccgccgcccttgactggcttttttccacccaattcttcgggatcaagctggggcttgacaataccgggaagctgctggcggcagccgatgcggaccggacggatgccacagtggtccacgtggctggcaccaacgggaaaggctccacctgcgccatgattgaggccctggccagggcacaggggtatgtgaccggcctgttcacctccccccatctggtggagttttccgaacgcatccgcgtgaacgggaatatgattcccccggaggcgctggcggaagaaattttcttcctgaaacaactggcggaaggctgggaacagccgcccaccttttttgagctggcgcttgccgtcgccctgcgccacttccgcaaaagcggcgtgaacttcatcattctggaaacgggcctgggcggcaggctggacgccaccaacgccgtgcccaaggacatcgccgtgctggcccccatcggcctggaccaccagcagtacctgggagacaccctggaagagatcgccgcggaaaaggcggccatcatctcccccggcaaaccggccgtgaccgccgtgcagagcccggaagccatggccgtcattgaacagacggcacggaaccgccgttccccccttacggtcgcccgggcggacggggaaacgccccggccatccctgcccggagcccatcagcgggaaaatgccgccctggcgctggaaaccatgaggcagctccacgccctcccctccccttccgcagccgccgctgccctggcaaaggtgcagtggcccggaaggtttgaacgccttgaaacgccaccgctggtgctggacggcgcccataacgaacatgcggcgcgcgtgctcgcggccacatggaaggaggaattccccgggcggaaggcggctctggtttttgccgcatccgcagacaagcacatccgggagatgatccccgttttgcgggaaatcaccggagaatggcacctggttccctgcacttccccccgcatcatgccggcggaagaattggccgtcctgctggccggactggaaaccggccccgtctttatccattccacccttccggacgggctgcatgcggccctggcctccccgcttccggccctggcggcaggctccctgttccttctgggggatttgaaagcgctgctccgccatgcggaaaaacgctgcaccgcccagtaacccctccatcctttttgtttttccccgtgatttccgacgacatgaccctttcctccctccggcccggagacctgcgccccgaattgctgactcccgccggggacatggactgcgcccgcgccgccgtagccaatggcgcagacgccatttattttggcctggaccgtttcaacgcccgcttgcgcgcgaataattttacgctggattccctgccggaactgatgcgcttcctccacgcgcacggcgtgaggggatacgtgacgatgaacacgctccttttcacctccgagctggcggacgccctcacctacctgggccatttgaatgccgccggcgtggacggcgtgatcgtgcaggatatcgggcttgcccgctgcctgacagagtggggaaggcaggatcccgccatgaagctggagctgcacgcctccacccagatgacgctttcctccccggacggcctggaattcgccgccggtttcctggacttgaagcaggccgtgctggcgcgggaattgagcctggaggaaatcgggcaatgcatacgccatacggatattcccctggaggtgtttgtgcacggggcgctctgcgtggcttactccggccagtgcctcacgtcggaaagcctgggccagcgcagcgccaaccgcggagaatgcgcacaggcctgccgcctgccctataccctggtcgtggacggcaaggccgttccgctgggagaaaggcgctatctgctcagcccgcaggatctgtgcgcccttgaccgcattccggacctggtccgcatgggcgtgaagagctacaagatagaggggcggctgaaaagcccggaatacgttgcggcggtaacggcggcctacagaaaggccctggacgccgcctgcgccggaatacccgtggatgaattggtgaccgcacgcgaccgttatgcactgcaaatggtattttcacgcggcttttccaccggctggctggacggcacggaccacccgcgcctgacccacggccgccacggcaagaagcgcggcgcctatgcaggcgccattgtggacagcggccagggctggctggacatcaggccggaagggaacgttccgctcgctcccggcgacggcttcgtcattgacgccggggaggaccgcaatgaagaacagggcggccgcatctggaaagtgcagagaaaccgccttttcttccacggaaaagcctccggcattgactggagcaaggtcaggccggggcagaagctctggaaaacggatgatccggccctgaacgccgagctgaaaaaaatgcgggagcacctgccggaggccgtccttcccctccatttggcatgcaccggatccgccggggagcctctgacggtttcctgcccggaatacgggtgttccgtgcagtccgcacagcccctgcaaacggcggaaaaacgcccactgactcctgaagttctggaacagcagctcggcaggctgggaggaacggggttccgcctggcttcctgcgaatgctgcctgccggagggcctgatgctcccgctcagcatcctcaaccagacaaggcgcgccctcgtggaacaaattcaaacggcccgtcaggaaaaagaaatctccgttccctcccgtcttccggaacctttcgtccttcccgcgcttccggcgggtgcggcaacgccggacgcgccgcctcacctgtccgtgctgtgccgcaggccggaacagatactttccgttctggatgccggagcggacgccgtctatctggactttgaagacctccgggactatgcggcgggagtggaagcggtccggcggcacacgaaaagcatccccgtctttctggcgacgccccgcatccagaagccgtcggaaaccggttacttcaagctcatggaacgggcggagccggacggcgtcctcatccgcaacctgggcgcggcgcagtacttccgccattcccccctgcaccgcatcggggatttttccctgaatgtcgccaatccgtacagcgcggccatcctgaaggaacgggggaacctggattatctcaccatttcctatgacctgaacgccggacaggtggaggacctgctccgcgccgcgccgccggaatggtttgaactgactctgcaccagcacatgcccatgttccacatggagcactgcgtgttctgcaccttcctgtcggacggctccagctataagaactgcggccgcccctgtgaacggtaccacgtgcagctgcgggaccgcgtggggcagctccatcccctgctggcggacgccgggtgccggaacaccctgttcaacggccgcgcgcagacgggagccggctttttccggggcttccgccatcagggcctttcccgcttccgcgtagaactgctggacgattctccggaaaaagcacgccttctggtatcccgctaccgggaattgctggacggctcctgcactgcggcccggctcatccgggaactggacgtcgcggaacagctcggcaccacggaaggcacgctccggcccagataacgcaagcccgggcctggcaaggagaaaggcggacaaagaatgcaccgcccgcgccttgaagcggcgcaaaaaccgccttatgatggcatcaatgggaatggaagactcctttcccggaacttccgcaagatgaataattcccttaaagaccgcctggtccgtcacatggaagacggacattacgaaccccagagcaaatcagaactggcccgcgccctgaacgtggattcccggcagaagcaggacttccgcgccattgtggaccagctggaggaggaaggcaggctcgtgcggctgcaaaaggggagatacgccctgaaacgggaacgccggaacctggtgcacggcatgatccgcattctgcgctccggcaagattctttttctccccaaaaagggggatcccgccgcggcggacctggggtgggatctggaggccattccggagctggagctcaagcccaaccacctgggaaccgccctggacggggaccgcgtggccgtgcgcgtggaacgcaaggcggccaagggccggagaaacgtccgcagggaccgcttttcttctccggataccggcatgaaagcccgcgtggaggaagtgacggaacgcgcgcgctcccgctggctgggcgttttccgcgccggaaagaacaagctgggccgcgtgctcggggacggcgtaggctctccggaatacattgaactggtggaaaaacccgccatggaggtgcttcccggccaactggtttccgtggaacccgtgtcccgcggggaagaaaagaaggccccgcgcgggaaaatcgtggaggtgctcggctacccggacgatccccacgtggacatggaagccgtcatcagaaagtatgacctgcccgtggaattccccgcctccgtgcttcaggaggtggaatctttccggaaaaacccttcttccgcggaactgggccgccgggaggactggacggaccgcaccgtcatcaccattgacccggcaagcgccagggattttgacgacgccatctccatcacggccactccatccggctggacgctggccgtccacatcgcggatgtctcccattttgtgaagcccggcggcgcgctggatgaggaagccctgcgccgcggcaactccacctacctgccggaccgcgtccttccgatgctgcctccccgcctttccgatgatttgtgcagcctgcggccggacgtcgtgcgcctgacgaaggtatgcgaaatgaagtttgataaaaaggggaagatgctccacgcccgcttcgcggacgccttcatccgcagcaaggcgcgcctgacctaccaggaggccttcaccatgctgaaagggcatgacaagggggaagtttcctccatggtccgtgaagcctggaagctggcctccatcctgcgccgcaaccgctacgccaagggagccctggacctggacttcccggaagtgcgcgccgtcatggacaaggacggccacgtgacggacatcatcacggaagagtacgatgagagccaccagctcattgaggagtgcatgctggccgccaacgaggccgtggccctgacgctgaaaaacaggaaccgccccaccatctaccgtgtccatgaagaaccggattccgccaagctctttgaattcggccagttgtgcaaactgtacgggcaccccgtccacgacatcggccagcgccagtaccttaatgagctgatgaagtccatcaagggttccccggacgagcaattgctcaagctggcgctcctgaaaagcctgatgcgggccaggtacgacacggagcccctgggccattacggcctggccaccgccaattactgccacttcaccagccccatccgccgttacgcggacctggtggttcaccgctccctgaatcccctgctggccaatccccccaagggggccaaaggcgccggcagcgtaggcaggctggaggaggacgcggaacacatttcagagacggagcgcacttccgccagtgcggaaaaggacgccaaccggatgaagcttttcgaatggctggaaggccagtgctatgcggaccatccggaagtgcacgaggccctgattacggaaacgcgccacttcggcgtgctgctggaaatcccgcgcctccagatcaaggggctgatcaagccggacaagcttcccggcggccgctgggtgtacgaggcattcgccaaccgctggaagagcgaccacggctccgtgctgtgcgcagggctgcgcattcccgtcattcccgtgaaagtggaccgggaacagcagtgggcggattttaccatcgcctcacgggaggaacggcggcagccggaaaagacagcctccccaggcagaaaggagaagcgcacgcccggccgcaggcggcggaaccgctgacggcacacgcccgcaggcgggaacggccacatgcgggcgttaaatccggttctccttgcagcagaatcaaatctgtattttttcaccaaaattttcttgaagcaaattgtacttttcatgtataaaatggttgctgtttacttgtgaacccgaccccacgcctatgaactcaggacgttgaacccgtaagtaagcaccatatgaatgctgaatgccaaggtccgctcccgggtctggagcggacctttttcccggaagcctgtcatggcggaaacgggaaggggaaatgagtgtgtccaacctgcatgacagcaattcagcatatccccgaacgggcgcctttcaattacgctgacctgattgaataccgcgaagggcaaatcaccagcctggcccttgtgcgttccaaaggcgtcaacatgaccatcctggcttttgacgacgagcagctcctccccacccaccagacgcccggccccgccctggtgcagattctggacgggacggcgtattttaccgtgggcaatgaagaggtcaaccttccgcagggcaagactctcctgattcccgccggagtgcctcattccgtcattgcgcaggaacggttcaagatgctggtcacctccatcctgccgctggactgagcggaacgctttttccacgtgcgcacgggaggaaaactcccggcttcttgttacagttccctgacggtaattgacgaacgctgctccaggttcagctccggatggcgcacggtaatgacgtgcgctcccggttccagcagcacggaggcctcttctccatactgcacgacggtcagggtgggggatgaccacaccgcccccgccggcaggttggagcgcagtttgagcctgcgtcccccgccgggcagttccggatccagcgccaggcgcgagccgtctgccggaaccaggatgcggggagcctccccggaccacgcccgcggaagcaggcagaaggtattccccaccgtgcaggaaggactggtaaaccactccgtataacggctgtccagatatgcccgtcccacggcatcgtaatccgccggggaggccggctgcggcatcgtttccggggaagcccattcctcccggacatgggcttgcggcagatccagcccctccgccctctttccggtgcgggaatcaatgcggatgcgcaccatgccgggagggggaccggggaaggaaggggcaagattgcggtgagccagcctcatgaccccggcaaaaatgggggccgctccatccatgccccccacctgcttcatgggggaggcgtcaaaattgcccacccagacgccaaccgtgatttcacgggtgaagcccacgcaccagttgtcgcggaaatcggaggaagtgcccgtcttgcacgcataccggaagggaaggttcatcagctcccggtcatggaacgccgccatccgggcttcccggtccgccagaatgtccgccgccatgaagcaggcttctgcaggcagtacgggccgttccggaacggaagcaccctgctccagcttcagggggaggaaggagcctccgcgcgccaggcacgcataagccccggtcaaatcccgcaaggtcacctccgcattgccgatggcgaggcccaggccgtaatgcgcggcgtctccctggatgccccggatacccaggttttccagcagtttcagtagccgtgacgggccgccgaaggtatccagaaccctcatggccgggatattctgggaacaggccagggcctgcctgacggaaacgggacccatgtaggccctgttgtaattctgcggcgcttccagcccgtgcgcgctccggtacgtggtgggaacgtccggaagaacggttcccggataggcccccaggacaaatgcctgggcgtacacgaaaggcttcagggcggaaccgggggagcgcggcagggaagtcccgtccatcagccctcccgccggatgcttccggtccgcggaaccgaccaggcaaagaatgttccccgtggcgttttccaccacaattacggcggcctgtgtcacatgatggcctttcaagcgttccagctccctcctcacgatttccagcgcgctgcgctgcagggaggcgtccagcgtcgtgcgcacctcccccgtccgtcctgcgtgcatcagggcggctgttacatggggagccgccggctgccgcccttcttccgttccggcgctgaacaggggttcctgcaaggccctgttcaccatgtccgccgggaacatgccttcctcctccaggcgacgcagaacgcggttccgccgttccagcgcacgttccggatgccggagggggttcagaaaggacggcccctgcggcaaccccgccagcagggcgcattccgccagggacaggcgggacatctcccggccaaagtagaaacgcgccgccgcggcgggcccccggcgcagattgccgtaatccaggaggttgaaataggactccagaatttcctccttgctcatgctcatctccatgcgccgggcctgaaaaaactcccgggccttggtccacaggttcctgcgtgcgggaggattggcattcttggcgagctgctgggtgatggtggacgctccggacacaacctccccgcctgcggcattcgccgccgcggcgcgggccagcgccaggaaatccgcccctccgtggctgaaaaagcgtttgtcttccgccgccagcgtagccttaagaagcatgtccggaacctcccggagccggacaggctccgtgtggtaataatccggtcccggcaatgtggcgattctgccgccgtccctgtccaggaccacggcgccccgctcttccggatggagcagcccttccggcaggggaaccagccagggcacggcataccatgcaagcagccacgcggcggccagccctccggcagtccaaagaagggttttccgttgaaggagctttttgaaaaccgccctgttcatagatctgcgccgcatcatgaaaacactgcacttacttccccgcggagacggtcagtttctggggaatgctcaatccgtaggtttccggcttgtacatcagctccgccttggcggacggggcgataacggagccggacttggtcaccctcgccaggtagcgtgccgtaaagcggcctcccgaccaggaatcggcgaaaaagcgcacccggtccttcaggaattcacggtgggaaacccaccagctccagtagaaccagcggtttcctgcatccgccgtctcgctctcccggcctcccggtatctgggaaagcagcgccggattgacggcttcaaaagcggagggcaggtaatcctccatcaccacatacgtcagcgggtcagcggacttgtccacgtgcagcgtaatcctcaccaggtcccccacggcaaactccgccgcaggcgtccaggttccttccggagaaagcctttcataaacgcgggaaacggcaaagcccctgttgacggcggctccgtcctgctgcgttttgctgcgtccgcgggcctccgccatgccgtatacccgggttcccgcttccggaaggctgagcacggccttctccccaaccgcggtcaggaaccgggacggggaagacacggagcatatcccgtcaaacgtccggccgccgcggtccacgcggaaggcggcggaaaggggcgcctcctgcaatccttccaggtattcccccagcagaatcacatcccagccggaagtccaggtggaatagggggcccttcctccgaaagatccggacgtcctgtccacgatcaggcgttccagcctttcccggacagcccggtcaccgggggcctgcgccatctccgccagcgccagcagaagacggcagcggggctgtttcatttcctccccggaaacattcatcaggctccgggcctgcgcctttgcctccgcacgggaagagagggccgccgccagagccacgtacaggcggtcttccgccctcaattcagcggcatggtccagcaggcggttgagcagggacgcgggcatgagccccgccctggccagcacccatgcccccaggagcccctcccgcgggcgggcggacagagaacgccccagataggcgtacagcttgttgaggccctgttccggaatgtaaaccccctgctcccgcgccagggtcagcaccagagcggcatacgcgcagtactcgctcacctccgtgcctccctgccagtaggacagggcgccggaagaaagctggtttttcatgattttgtaaacgccgctccggagggccctggaacggtcctccggcgattttcccttgaaaccggggagatatttggccaggagcggttcataaatccagggcagcgtggaggaggaaagctgttccaggcatccgtacggataacgcagcaggtaattcacgctgccgtccgcatacagcaggggggacgtgcccagcgtcacccggatgggggtgcctttcaggaagggagtcgccagcaaccccggcagatccagcgtccggccggaggaaagcgagaagcagcgcagctccctcagctccgggaagggaggcaccacctcaaacgtgtgctccacggaatccttcagcaaggaataaacgccggaggaataaggcgtgccgctgccgtctgcggcgcggatttcccaggtcagccgggcttcccccggctgcgtgaattttacgttgaacaccagcgttttcggctggttcccgttcaaagtcagcgtctggacgggctggggcaccgaagccgcagcggtcccggatttcagcgtgaccacccacgggcccttcctgtcccccgtctggctgaccgtcaccggaatgtccagggaatcaccctccgttgcggtaaaggggggagcgggttccagcatcacgggcttgtttaccacataggcgctttccccggttccgaaatcggcagctcccgccagggcgaccgccatcacccggtagcgggtcagcgtatccggattcctgtactcggtcttgaaacggccctccccgtccgtacggagggaggccagccacacggcgcacgggttgaaattcttccttaaatccaggttctccggcgctttgcgggagccgtcggaggaatctccgccgccgatgaaaactcctttgttgtccgtggagcggccaccccagtcttcatccagaatttgttccagcgtcgtccacgtgcccacggacagggggcggtccgcatagaagtaccggatgggacggggagtctggtacccgatgacctgtaaggtgccttcatcctccgcaaacaggcatacctccgcattccgaaccggcctgccggaataatccgtcaccacgccgctgaccacggcgggggaaccgggccgggacatcccggcggggggaaacacctttacattcagggtatgctggacaggctgaaccttcagcgcggcatatcccagcttcaactggggattgcggaccttgcggctgctcaggtccgcccccttcaccaggaaaacggaaatatagacattcggcgcgtccgcctcttccagaggcacctcaatcacgggattgtccagcgtcagctttctggcaaaactccggagcaccttttcccgctccaccgtcaccatcacctccccctcaatgggcgtctggatcaagagacgggccgtctctcccggcttgtacaactgcttgtcagggatgatcttcaccttcaggccgtcatggtactcccacggggaaacgtcgctgccgtaaacccagtactttacggcagtgcggaattcccgtccttccgcgtccctgccggaaaaagccacctcgtaaataccgtcctgcggggtgggaacggagacggcttttcctcccgtacggacatccgcggaatccgccggggcaagcgtcagggccttttccagcaccgtgctccttacctcgtcattgcgcacggtggtggcatctccgctctcgtagcgcgcgggacggaaagcggtgcgcgtcacggtcatgttgagatcaaggccgctgcccgcatagggcttgccgtccagccccagggcaatcaggcgcaaatccaggggcgttccctggcggcagatggaagaactgttcttcacgcccacaaacacggaagccggattccagacggcgcctcgggaaaccttgaccaactgctcattcccgtttaccacggaagcctggagggacagcctcctgacccgcgggaaggactgcccgtccagggagaactccacggtattcctgccttccccgtccagcacggaggactgctgcttcatgtgggaggaggaacggctgctggaataaccgtaataggcctcccagtagcccccatcgtcatcacggtaatccccgaaacggtaatccttgtatccggcaggataaaagttggagggagtactgcgcagggaccagttcaccttgccgcctgaaacaggcgtgccggtaaaattcgtggccttcacatccgccttcaggagatgagcgccgggcttcaattcatgaatcttctcctccacttcaaactcgttccgcttgaactcggctacttccacctcataccggaactcccggttattcttgtcaaactccttccggtaatacttcttgtaatcgtattcgtcggaggaatcatcctctgccccttctttttcctcttccgcggaatcccctttcagccgcaggctggcaaggacgctgtaagttcccgtctcttccccgggaaacgtgaaatccaggtcaaaggttcccacatcggacaacttcacctgcttgacggctacttcccggtcccgtccgtccctgaccgtcagcttgacctcctccacgggagcgaggcccagcctgttgtccagcagggagcgcacgattcccttcaaatgcatggtctccgccgggcggtacaggttcctgtccgaaaacatgaacaccctcgtttccgcggtagtggcgggattcagccccagggcttcccattcgtagggcagcgtcttcacgccaaaggaccacatcctcacctgccccggccaatcctccagggggctcaggtaactgtccaccccggacaggacgcgaacataggcggcctttccgttcatcccggccatgggcaaaatcacggaaccgtgctccacgggaacggaagccagaacggagccgttcgcatccagcaattggacctgcgctttttccaccgcttttccggtggaaagggaatacacgtaagcaaacatggtatccgccgtctttttatgcagaacgcccaaatccgtcacctgcacgacggcctgcgcggcgtaggatgcctcctttccatcgaacttccttctgcctccgttttccgacggcacgccaaacagcctgtacgcctccagcaccggatcactgacacggccttccacctcaatgaaatacatgcctggctccacggctccgccaaacaggccgtccaggctgatggccgcttccgttttgccgcgcacgtccagtatcagcgcgcccgtcttatccgccgcaagaagctccgcaggcagaaaatgtctttggtcgcggtccgtcacggtacgggaaaggggcgcggactggtcccgttcataaatcttccggtaggccgccagcgtctggtgccggtggccgtccctgatccggtagccgcgcaccgtcaaatccttcaaattgctcacggaggctttcaacttgcgggctccggcgtacatgacgccgttgttgcccgcatccagatacaggcacggatcctccggctccacttccacggaaccttccgcattctttcgcgccaattcctgatcatccacggaccggacgcccttcagcctccattgcagtttaaaaacggcctcgtctgcgctcaccagaaaaggcagggacgtataccactgggaccgggcatgcttcatctccgccagccgttccctgtccaggcggattgctatttttccggccgtttccgcatcctctccgtcaagggatgtcgtaaagcctccctcctgatcaccgtaagccatcggcttcccgccgccctccacgaaaaactccacatggtcccggcagaaccgttccaaatcctcaatccggacagggagagtccattccagagtaaaccggcctccgttcccggaaaacgcatggtaataaccggaggcggaaaaacggggcacggcccccagtttgatttcttcccatccggttttctgccctcctccccgggaggacaggaaggaagcatccaaactgaccaggcaataattcctgccataccggaacattccttctggctgaatgacatacacgccgggaacaaccatgccgtccggacggcctctgaaccttccctcccccgcaatatttctcacacggtaggatttggcgtctctcacctccttcaacgtggcaggccttagccggaaccccgcatcgttccccccggcgcccgccttgagccgcttcataaaacctgcggacttcaactgctcttcatctgaaacgccggcaaaacggaggttcttttccaatgcctccttccatgagcaataaccgggaagcatcaggaaccccttgccgtcgcgatacaagccattcgcaggattgcccctgtccggaactgcgtcgggaaccaccaggaaaaaactctcccacgggtaaacttcactgccctgccagcccctgtccatggaagacaggaagaaattccaggtcgtgcgccccgtcagacgcagcggaacggacggcaccagggaaccgtccagaaaacggacattctccgccggtttccatagataggaggaccggaagggaacctcctcctgcggaacgcactccagcacgttgggggtaatccatttggaagaaaacttcaaggaagggggaacgaacatcagcttcgcgccttccggcatggccgtccctgcgccgttgcccagcgccagttccaccggtttcttctccggggaaaaggacatcagttccgggtccgccggttttcccacctcggaagcgggcaccacggccttgtcaaacaccagttgaaacggcttccctttttccagatgggacggagaggaagacggatagcgcaccgtagtgtcggcaatggatggaaaaataccgcaaattcctaagaagcagccaatagcaaaagaacaggttttcatgggaggagggtaattctatgtacccatcttctcctctttttaagtcttcaacacaagcagaaaatccgcaagcggcaaaaaatagagataaaagtcgttaccacttgatgaagtttcttttgtaccttgaataatgttctataaaaactcctttcttatgctcactaggatggtagtgcggtcatgaatccaaccggtaatttttaaatgcaataactccaatggaacgcgggaaacttggttcatcagagaaaaatctcctttaccttttgctagtatttctcttcctgcacgctgtcttttaccctggcaatgggtaaattttgaaaatatggcaaagaaatatgtgccaccggagaagaatcccctcccttttcccacgttgccatccgcctcaaaaactcaccaaatatcataacgttcccggcgtgtttacgttgttagtttttgattcatggtagtcgcaaccattgaacaaacatcatttcattaccatgaacaacactttcaacatcggcgccatggacaccgtctaccccttcattcccatgtaccccaacgggcagccacagggcgacttcctggtcaacggcctctccgctcccgtccttatccccaaacgaactgcttcctcccccacccgccacgaatggttcggatacctcaaggtcatggctccctccacctgttttctccacctccacgcccactcttccatctccctttccattcccgccaaggatctggaactctccacggagccgagttcttccacccctctccgccgccagatccagtttgaccagggatactactggtgccatatcgtccaccaacaccagcctgccgcggaggaccaacaggagttctgcattgccttaatgtgcgacaaggaaggagagcccgacctggattattacctgctggcggaaaacactcccgccggcaaggagggagaaaccgtcctgactctggtcaacctgtaccaggagatggaagaaggagattcgtcgagcagttcggcagggggaggagattcgtttgagtttgaccccaagccaagcagcagttcgagctcttcctcctcgagcagttcgtcttccagcagctcttcgtcttcatccagtttccagccgagttcttcggctcccgagcctcctgattcctccagcagcgcaccgccttcttgttccagttcgtcgtcttccagcagttcgagttcttcctcgtccagttcctccagcagctggtcgtcttccagtttccacagcagttctttggagccccaggagccggattcctccagcagcgctccgtcttccagctcgtcgtccagcagcagttccagttcttcttcgtcaagcagttcttcctggtcctcgtcaagctcatcgagttcttcgtcttcttccagtagcagcagttccagttccctttcctcttcttccagcgagccagaccaggaagaggaaccctgcccctgtgaatgtgagtgcaatgaagaaggggacgaacattgtgtccagacacaccccactccgggggatcccgagggagagcaggattgccagggcaacgcctgcatcaaccctccctccccgggaggacccacgcctccggttcccgccaggttcatgcggacggcacgctcttccaccactaattccgcggcttccagcggcttttccatgcgctacaaccaccccatggcctggagcgcttccttctcggctgacgagcgccgcgtcaccgtcaagcgcccctccggaagccatctctatttcaaggcccaggagggaagcagcgacgcttctcccatcggctcttccaggaagagcgactaccgtgtgaggcttctcaacgaagatcttactcccaacctccagggtactcccgctttcatggacatggttcttcccggcggcatggtcctgcgcttctcttcctccaccggagaggtcgtgtcggtcaccagctcttcgggccatgtgacctctgccgaggagtacttcagcaaggtccaggtcacttaccatcaaaacggctcccttgccagtgtttattcccgcgcccaggggctgatgagaagcattcccgaaggcgacaggctcaccctggagtggtttgctcccggcaagaccgtcccggacggggaaggcgggttcaccgttgccggagagccctacaagacggccgtctatgaaacctcgcttgaaaacggagtcaaggtcacccatatcaccaaccggcgcgccggtcaggagccgcatttcatcgaacgccgcgaggaaggcaacaaggtgaccatcgtcaagggggagggagaggagcgcatcgttcgcaccattgaacgcaacgccctgcccgattccaagtgggagcgcatcgaaagggtccagggcatcaacgaggaagcgcccgcctcctgtacccggacagtgaagaagtacaccgacggcggctggctgaccatcagccggacggagggatacaagacccctctggccagaaccaccctctatacctacaacgaccagttccgagtgtccctggaactcaaacccaatggcggttacacgcgctacgagtacgacgagcagggcagaaccgtgctttccgctgctccctgggccggtggcggggagagagggacccgaaccacttacgccgacctgcgcttcaacgacttcagacccgctacagaaaccgaagtgatcattgcggaggatggagaagaaacccagcttctcaagcgcacttacacgtatgaagacagcccgcaagtcggccgcacgaccgtgacggaaaccgctctgggttccaaccaggtccatacgagtgtagaggagacttacggggaaatggcggagtatccctacgcccggggcaggcggaagatgagccagggcgtcaatggcgtccagacggtctattcctatgaagcagccgcggaatacggagccattcaccaggtgacggagaccgtgcaggccaacggaagcatcgttccaggacaaagcaccaggaacgtagagtacatcgctgaaaacggcgccaccaccaggaaagaacaatacgttcacaccgggaaagactggtcgctgattgcctcggaggactacgagtacgacgacgagcagaggctcgtcaagacgacgaagggcaacgggcgcaccagcacgacggaatggatgtgttgtggcccgttgagggaaaccgatgaagacggcatcaccaccagctacgggtacaactcggccaagcagctggtggaaaccatccgctcggcgacggaaaccacgcctgaaacgattacttcctacagctatgatgcggcgggaaggacgattgccacgcgccgcgacataggagccatgaccacggtggaaagtacagagtatgacgatctgggacgggtcatttcttccacggacgtgctcggacgtgtcacgcgaaccgagtacagcgaggacggactcaccactaccgtcaccactccggcaggcgctaccctgatcaccaaaaagtactacgatggcattgacctgttccacggcggcacgggacagcggggaattgaaactcaacttgaattgaccgaagaaggcatactgaccactaccttgtccaagggagtcattctctcacgcaatctgaaaaacggttttggccaaattacccggcaggaacaacccaataccaagggcagctttatcgtcaccaggaacttatacaacggcaaggggcaatccgtctgctctcaaacggaggaccttgctcctattatcacagaatacaacgaactggggcaggccatgaagaaaaccgtcctgccggacgagttacatcctgataaccctgctaaaaacagaatcactgagcactcctcctgttaccggttccgggaagacggcgtctaccaggtgcaggcttccaccacctacaatgccgatggactccccctcacccagaccacggaaaacatggtctccagactcagtgctgtactggaaaacaaatccatcaccacggacatctacggtcagcagagcgtacaatggacggagtatattgccccaaccaagcgcacccagttcagccgcattcccacttcaaacatggtagccgagtctcttgtcgtggacggctttaccgtaagccagaccgaccactccggaatccgttcctcacaaactcgttcctacgcctccacgggcatggttctcaagcagacggactccagaggtaatgtcaccaccacggaaaccgaccttgcgggacgtcctgtccaaactaccgattctgcaggcaacgtgactaccaccagctacttgccctgctgtgacaatcccgcctgcatcaccgacgccctggggggaacagtttgctattcctacgacatccgcggcagaaagacggccgagtacggcaccgccattcagccggcctgcttcgcctacgacgaagccgatcacatggtggcgttgactaccttccggtcgaacgaagaagacattacttccgatccttccaaccgaaccgacggagacaccaccgcgtggctctatgacgaggccacggggttggaattgaaaaagacctatgccgacggctcccgcatctccaaaacctatgacgagcttaatcgtctgaagacattggccaaagcacgaggcgttgtgacaatatatacatatgcttcccttaccggagaacttgtctccgcctcccacaatgacggtacgccaggatgggagttcacctacaaccatcttgggcagatgatctcagtccgggacgcctccggcatcagggcattttcttatgatgcctatggaagaacgcaacaggacacttcctttggaaccgtggaaagctgcattcaggaagaatacgatacctttggtcgttcggccggctgccgcctgatggtcggcacacgcaccgtgcagcactcccaccttgactatgactccaaaggcggcatgattgggataaatctggaaggtctaaagtctccctttacctgggagtacgatcaaaccagcggcttcctcaaccatctcacctaccccaacggcatggtccgcaataacgcctaccaccccacactgaaccttgtaaccgccatcggctacaggaagggagaggaggatgaattggcaacctgccatgaatacgactacgacgctctgatacgccctgtccaacgccgggattcctgggataaaacaacccctgaaacagtaagggattttacctacaatggccgcagcgagctggtggaagaccgtatcggccggggaggaagcttcaactatcaatacgacaaccttggcaaccgcaaggccgcccgtgaactggagaaggaagtagcctacgaatccaacccgctcaaccagtacacggagattgccggggaaggagaagattttacccccgcctacgatgccgacggcaaccagacccgcatcatgacctcaacgggcatctgggaggtgagctacgacgccaacgaccgccccgtgatcttcactcaagaagacggaagaaccgtgattacctgctcctacgactaccggggaaggcgtttcgagaagaaggtctccgtcaatggggcagtatccagccattgccggttcctgtaccgggactacctgcaggtagctgaactggatttgagacatcctgaacctgtgcttgtaaagagctacctgtgggatccgacggaacctgaggcaacgcgcgtcctgatgatgacatgctggcaggaaaacggaatgaaagtaaaagagcatctctacttcatgcacgatgccttgaagaacgtcacttccatcttcgacggtcagcagaaacaacaagcccgctacgagtatgctcccttcggaagtcctatcacggaagaaggagatatggcccgggagaacaagttcaggttttcctgcgagttctcggatgacgaattgggactcgtctactacaattaccgccaccttaatcccgcagacggcaggtggatcaatcgcgatcctatcgccgaacaaggtggatggaatttgtatgggttcattgataatagagtaataaactgtatagatatattggggaaaaaattatttattgtaacatcttttcataatgatgaaacacaattaataacatttactaaagatagagaaaatatagtaaaagaatcaaataaaatagaaaaatttatacaagcctataaaactcatctaaccacacaaataaaaaagaaaagaatttattttaatggggatatttatgaaggagatgttaacactttaataaattattttaatgacgattcaaaaacctctttgaataatcaaatatctccggaggaggcttttaaagcagcaacaaaagcttctcaacagaataaacctgatgcattacaatttgccgtaatgatttcacacggaaagggagaaacaagagctccaatttttgcgggacaaaatggagtaacaatacatcccttaatggaaaaaattctagcgaataaaaatattaaaacgattgcttgttttcatgaaacaggacatataaaatccgtttatattttgtctccacttaggagaatattcagagtaaagacagggaataaagaatgtaattttattcatttttttacttctgatattacaattcttagaacatcaacgggacaccatgaactcaaaacattaaatccgaatatgatcaaaatgaataaatcaagagaggagattctcgaagagtggaaaaagaaagaaaaaaaatgaaaaagatatttgctaactgtttcagtattttcatttattgcatacttatgggattactaccacttcagtcgctccatgccagtgtcgatttattccatatgccgtctccgaataacaaaacggtattggtgaaaatcaatccggaggcagtcagttgcatctacagctaccggcagttagtgggatggtgtgaagaggaacggagctttgacttggactcccagctttggggattgagttttatacttggctgcggggaggaatgtatacaggcctacaaccgcaatacgatgcctccccctctattatggatgatgttgagacagcctctttgccgtgattatttatggatggtcacgagaaatcaactgccggtcgtacaaaaggaatggaaatacctatctatgttcccggaatggccctgctcccgcggatggcttccggttttgatcattccattcaaccaggaactcattttccacaatggtcggcaacagcctgtaagcctgggaagccgcccttatttatgcgtggttgtccagggaatcgcccagttgggcgaatacaccagaagggaccaacatggaagggacaaacggtacggcattttttcaaccgtcaactggacattgatgtacgacgttgaaaaccattgttatgccaatgaatctccaggtaccgttcaagtatttcactttaaacctaaaagccatcccctgaccacgaaacaggctccccatatacttcattaccattgtcccacaatccctccctttgatcttccggaaaacatgccaacaccggatgaagtaaaatttaaatgaattttacctggagcacgccttctcttcctggcggaagccgccttgcgcttcagagagaatataacgatcgtcaagaggtcagttcttcaggggcgccgtttatcagcattccgcgcgccatctggcctgctccgtcttgtagagcttgcacgtgacggcgtccgccagggcttccaggctggcctcaatgatgctgtaggaaacgcccaccgtggtccaggtagcgccgccgtccgaagattcaatgagcacgcgcaccttgtagtcgatcagtgcatttgctccagttccgggtatcagcgcgtcaggacacagcagaaagacggccgagtacggcaccgccattcagccggcctgcttcgcctacgacgaagccgaccgtatgatctcgctgactaccttcagcgacggcgaaggcgacattacttccgatccttccaaccgaaccgacggagacaccaccgcgtggctctatgacgaggccacggggttggaattgaaaaagacttatgccgacggttcattcacaagcaagacttacgacaaatttaaccgtctggagacgctgaccaaagccagaggaatcgtcactacctacgcctatgctcctctcaccggagaacttatctccgtctcccacagtgatgatacgccaggatggaagttcacctacaaccacatcggacaaatgacctacgtccgggatgcctccggcatcagggaatgctcctacgatgtttacggcaacatgattcaggacacttcctttggaaccgtggaaagctctcttcaggaagaatacgatccctttggccgttcggccggctgccgcctgatgcttggaacccgtaccgtgcagcactcccaccttgactatgactccaaaggcggcatgattgggataaatctggaaggtctaaagtctccctttacctgggagtacgatcaaaccatcggcctcctcaaccatctcacttaccccaacggcatggtccgcaataacgcctaccaccccaagctcaacctcgtagccgccatcggttacagaaagggagaggaggaggaattggcaacctgccatgaatacgactacgacgccctaatgcgtcccattcagcgacgagactcctgggatagcagtactactccagaggtaagagattttacctataatgaccgcaacgagctggtggaggaccgcatcaaccgagaaggaagttttagctaccaatacgacaacatcggcaaccgcaagaccgcccaggaactggagaaggaaatagcctacgaatccaacccgctcaaccagtacacggagattaccggggaagaagaagattttaggcctgtcttcgatgccgacggcaaccaaaccaaaatcaagacttccacaggcatctgggaagtgtcctacgacgccaataaccgccccgtcgttttcaccagccaggatggacggaccatcgttacctgcggctacgactaccggggaaggcgctttgagaagaaagtggtcatcaatggaacagtatccagccactcctgattcctgtaccgggactacctgcaggtagccgagctggattaaggcatcctgaacctgtgctggtaaagagctacctgtgagatccaacggaaccgacggcaacgcgcgtcctgatgatgacatgctggcaggaaaacggaatgaaagtaaaagagcatctctgcttcatgcacgatgccttgaagaatgtcacttccatcttcgacggtcagcagaaacaacaagcccgctacgagtatgctcccttcggaagtctcatcacggaagatggggctttatcacgtcttcaccgtcagaaaatttcaaaagaatttgatattaaaggaagtatggaaatagaatattgttgaaaaaaggtgattcatcagataatataatttataaaattaaactaatatccaagaaaaagaaatgaaagtaatactcgttcctctgctagctatgagcacgtttacaactgcatgcaaagaacataccataaattcaaaagaaaaattggaagaacctgctaagcatattagggaaacagtgactatattaagctctcatccagagcttcatcatttcccagcttcctccaaaatttggattgataaagaattaacatccttggaggaaagcaatataagttcaagacggctaggatattccatacggactaagcatcctgaaatcaaagaaaaggtgaaaggagtttttgcacattctattgatcgcatcttgccatccaagaaaaatattgaattgaacacaattcaaaaaaatcatcatcttacagagaatatcagccatgtcttaaaaagaattaattccgtatataactctctgaattatccagttattaatccggaagatatagaagcctggtggcaggatacagattggaaagaaaaagaaggacttccctatgatcattattacatcaccgccctcattctgaagaacggccatacattgtttatttttgatcggcgtcctgtactgactgaagatgaaattcgttattggtaatcttgaaaaatcccatagagacaatctaaatagataaattattttttgaaattattacgccaaatgctacaaatatttttaaagatctaagtaattcaccttcaaggaagcatattcaagacatacataatcgcacaatttgatttttctttgctccaaacccttaatcctattaacaataccctgattttattctacatcttcttaatggagtttagcaattaatatgcttggagaaaataatatgttaaaaaaattacacaacagggaaaatcgaatctctaaaaaatcaaaaaaacctcccattcaacaacaggtgcaataaaaacaattccaaatgaataatgttaagagttagttcatatttttcaaacagaattattccctttagtcttgtggaaatcgctctctttgttttactttttccgaattcttgatgaacagcgccagcctttcattgttgccatccaaattccctcgatgactgataaaaacggccttacaagattaccctatatagttccgtttcagaataaaaggggggttccagcataaggctgttcaaaaatggaataagcctccatagtctctcaaagcagaaatcatgatgaggcattatttttgatcttctttcttttcttccgcatccagcgtttcaaagcgggccagaacccagcaaagatcggaaaggcggttgaggaacagggccgtgttgacgttgctcagggcgttatccagcctcagcgccaccacccggcgttccgcacggcggcagacggaacgggccaaatcaagctgggccgctcccagggaaccttccttgccggggcgcgcccaccccttgaagcggatgtcgcattccttctccagcagatgggcctgttcctccaaccatgctacgtcctccgccgtaatgcgggcataacccttggcgtcatacttgggcaaatcctcctccagcgtagccagttcccccatggcccccaccaggcgcgcctgaacgccgtccagcatttccaccgtccgggggcttactccggaatggcgcactacgccaatcagggaattcaattcatccaccgttccataagcttcaatgcgcggggccgtcttggggctccgtttgccgaacatcaggtccgtttctccgctgtctccacgcttggtgatcacgctcataccctgtaccctaccatgcctgcgcggccctgcacgcaaaaaagaaggcatcccacctcgccaacggcgcaaattcgatgttccggacagccgtccatccgctggccctgttcccagtacccaatcacccggggattttgtccattgtggttaaaatatcttgtgccattcctttccagggcaggaactgcgccatgacacgtcaaccgtttgaaactttttccgatggctgtacaacccctgcatgacccggaccagagatgaattggcggcggaaaccgcaccgcccgtcaaagtgcctctctggacgcgggactacatcctggcctgctgcgccaacctgatgatggggctggccttcttcgaactggtgcccgttctcccactgtacttgacggggcagttgcaggtttcctccggctggctgggctggatcatgtccatttacgtgctggccgccatcatttcccgcccctggttcgcgcaccgggtggataccggggaccgcaagaagatttacatcacggtttacatcctgctggccctgtccttttcagggtatgccgtggccgccaccgccctggcgtttttcctgacgcgctttgtgcagggcctgatctggggcggcatgaccacctccggtccgacgatggccgtggatatcatccccccttcccgccgcggggagggcctgggctttttcggcatgacgatgacgctgggcatgtgcctaggacccgtcatcggcctccagatataccagcagtacggtttttacgtgattacgtggagctccctggtcctgtgcctggctggggcgggcatcgcctccctcatccgcgcccccaggcgccccgttcaggagtccgtgtatgaaacgcccaaaaaggtgctggaccgcctggtgctgcgcgtgggcattccgctggcggtgaatgtgatgatcgcctctttctcctacggcgttgtggctgtgtattccgccctgtacgggaaaatgtacggtttcaagtatgccgggctgttttatgcgctgatggggctgggcatgctggtctcccggttcatggtgggccggcagatcgaccgcgggcgcgtggcggaactttccgtcatctcgctgggcatcctgactgtcagcttcggcgcgctggcgtttgcgccgctggaatgggtctattatacctccgccatcctcatcggcttcggcttcggcatcttcatccccaccttccagaccatgaagctgaacatggcggaccgcggccaccggggcgccgtcaattccacgtttttcaccgcctttgacatcggggtgggcacgggcatgtttttcgggggcaagatttacgcttacctgaacctgaactgggccttcggcgcaggcgcgctgctgaatctgctggcgatcgtgtacttctaccgcatttccctggaccactaccggaagaacaagcttggcgtggattcggattgattttccttccgctattcccgttccggagcggaaaaaacgtcaatcacgcgccgggcggaaggcctcacgcgcagcaggcggggattccaggccagggaaatactgcgggacagcctgtccagcgcaggatgggtgaccttgacgaatcccccgcccagctccgcctccaccatgcaggggagaaccgccatgaacgccccgcttttcagcatgcgcgccgcaaacgggaaggactgcgtttcacactgcacccgcagcctgatgccgaattccgcgcaattccgtttcagcgaggcatggaagccggaaccgctccccagcgtagccagggggaacatgcccagcaggcgtgaaaaatcctcctcccttccccgcaccttttttccggccagggccgcgggcacgtacagcgcataatccatggagcaaatggcccggctttccagcccttccgccgccagcgcgctggtgcgcacgatgccgaagtccacatccatgttctgaagcttgaggggaatttcactgttgcggaggttctccagcgcaaacagccacggcaggccgcgctgctggatgtccgcaagcacgggagcaaccacccacgcgtgcaggctgtctccggcgccgatggtgaaccggtagggcaggttccggctccggcttttgaaatcgtccagcaggcacaggctttcgctggccagtcgcaccagttcccatccggacctggtaagcgccagcactttcccgcggcgggccgccagctccacgccgaagaattcctccagttccttgatctggcgggaatacaggctttgccgtgcgctgtccccgcgcgcggcggcggcaatgctccccgccttggccacttctatcagggttttcaggcggtccagggacagcccccgttctgcgaaaaggtgctcaaacataactttaaagtcatattatatgaatacttgcataatgcaagagtcagtaaatgcgctatggtaacggagtcacagggcgcagcgccgctttccgcggcccccgcccttcaaccaaaagaaaataaaaccatgatcaccatcgacggaaaatacacggaagcccgcgtgttcacggatgaactggaagacctggcccgcacccagatcagggacgtctgcaaccaccccgcctttgaaggaagccgggtgcgcatcatgccggacgtgcatgccggagccggctgcgtcatcggcttcaccgctgaactgaaaacggacaaggtgattcccaacctgatcggcgtggacatcggctgcggagtgctcacggccagactgcccggaatgccggatttctcccggtttgacgaacgcctgcgcgaacgcgtcccgttcggctggaacacccgttccgccgtccaccaggccctgctggatgatccggaactggatgatgaaatctcccgcatctgcgtggatgtgctgagaacggagaaagacaggcaccgccgttccgtggggtccctgggcggcggcaaccacttcattgaaatagcgcagggaacggaagacgcctttctgtgcatccactccggttcccgcaacttcggcttgaagattgcggagcgctaccagaagatcgccgtggccacttgcccggacgcctatctcaaggaacgcaagaaaggcctttgctacctgcagggagaagatacgctgaactacatgcgggacatgaaggtggcccagcgcttcgccgccctgaaccgccgcgtgatgctgcatgagctgctggacgatgccgcggacctggaaatcttcgacaccgtgcacaactacattgcggaagacaacgtcatccgcaagggggccgtccgggccggacttggagaaaagctcatcgttcccctgaacatgcgggacggctccgtcatctgcattggcagggggaacgaggaattcaattcctcctccccgcacggcgcaggccgcagcatgtcccgcaaaaaggccaaagccaacctttccctggaggaattcgaagcttccatgcagggcattttctccacctgcgtctcccgcgctacgctggatgaagcgccgatggcctacaaggatggagaaagcgtgctgggcaacatccatgaaacggcggaaatcgtggaacgcatcaggcccgtgtacaacttcaaggcgcccgaataacaggacgccccaacacccggcccctcccggaatagatttcccgggaggggtctttcctaattttcggaaccaagtcaggagcgcgtggcggaataaatcagcttatagggttccgcagtctgaatcggaatggcgtacaccttggaggtatcattccattccacgccggaaacgtcaaacttctggcggtcataataacccaccacctttccgttggtcactacgcagaaagcggccgcattctccccattccgcacgataatcatgctgtcctttttggaggcgctcacggacgggctgagcttcgcgttctgcttgtatttggtccaatacccgttgagctgggaaccatgcaggttctgtccccacaaatcgaccgttttcccatgctggtgcaggaaggcgatgcgggatttcggcttgggataccgcctggcggcgatccgggccttggaggcgcgggccatttcctccgtcatcttgaagctgtattccccatactggttccctttgtggtcaatcgggacgaaccaattgaaaatttcaaagtcatcagtaaagtccgtcctgctgacattgcagatgcgttcatacagggccagatgggcctcggaaacctcatacgcctgcctggaaagcggcttgcggcgcaatgattcaaacagcgcagggtaaaattccgggttgatgcccagcttatggaaatacaggtagaaggaatattgggcaaaaccccacttggcccagccgttcagatcatggaacggcagcccctttaccgcctctgacagcaggtacttgcacgggttttccatgtcggaggccagttcattgccgttaatggggttggtcacctggtccaggatcaactgggcgaagaagttattggagctttcagacatgctgcgccagttgaacggatgctggtagcagtggccgacttcatgcccgaatccccagaggcggttcccctgaagaacgccgggggcgagcacttcatttttcagcgtatttccctgatccccgacgctgtagccgcagtaataccaggtggcgaacatatgggctccgccttctacggaaactccaagctgccggttgttatgcggctggggatatttgtcaaagcccatgattttccacatggccctgacgctctcatcccacaccctgacggatttcgtgatggaatccgggctgtaagccttcagatattccgtgtgaaggatcatcatggaataccgccccacgatgtcgaacatgctgtggggggccttgccgatcatccgcttccagtccttgtccgtgtgcctcgtcacgtcaaaatatccgttcaccgtcccgctgcccacggggatgtgcaccttcacaggcttcttgggcgtgctgatatcggtgtggtacatcacataaagcaatcccgaacggttgattttgattttgtttactccttcattcaggggataggtggaagattcgattcccgccggggaaacggaagccagcgcaatatcctctccatgagtgggacccacgaatacaaggatttcatctcctttctccgcagcaattccggtgggattgtcaaatttgttcagggcgttgatatttctcaccttggcggcaaactccggatggctgtaagccttgtaggacgcaatgcggaattccttgtcttcataggcgccggatttcactttccgcgcaatgagctgcaaaaactccggcagcgccttgaggtctgccagggtgcacctgggattgatggaggaacagctcgtgtctctgaacactttcagcaattgccggttgagcgtggattccgcctttttgtaaaaactgatctcccgtacggtaaacgccggggaagctccttcagggtaatcaacctccaccttgattttttgaactttctgaagagggtttttaaacctgatcattttggagccgcctatatcaaactttccaaggttcttccacgacgagccggacatggcggacacggaaacttcattgaaattggctccggaaaaggtgatgtaatgaatggtgtccggcacttcaaatacaaattccccctccacatgccgcgctccgggaacatgccagttggcggattccagagaaccgtccacagcctgctttacggaatggcctcctgagtagggggactgaggggaagaagcctcccttacttgaagagggatgtcctccggaacgtccagtgaaggatatttttccgcaagggacaaattcgcggcaaacattaaaaaaatgaaaaataaaaaaaacggagataaaatcagctctcttttcataaatagtactgggccctgatgatactatacatgatttccagcgtgcgtttttcatgttatccctgtgatggcgcaaaatcccctgatgcaaggacgggatttttcctctgctccacggtccaattctttcatggacccccacggaacattatgccatgttatccttcatgaacggaagacggtcccgtcatcaatcaggaaacaagccgggcaaatggattgccgtcctggccgttcccctctttctcctgggcacgggactgttctcctttttgtggaacgttccgctgaatacgctgagagccgctcattccgccacagcgcctcccgcaattcttatcaggaaagcttcttccccggaaaatcatcccatggccctggactcctccttcctggccggcatccagcccttcctggaacattatgcggggtccgtcagcaatgccgggcgccttgacttcaccacccatgacccgcaggaagtggaaatacggatggacgggctctccatcggcctgagcccttccctggcgattttcaatttccacaccaggtacgggttcagcatgcagacgagcagaaaaccggacgctgccgaccgggcggtttaccagtggctgaaaaacatgatgcaaccggaagagccggaggaatcggggggacgttgacacaggcatcgaacggaacaggctcggcgttgtctaatccttcatcttcccggaaaagctgtggaacggcaggttcttcagccaagggagcaactgcatccgcaccggaagacgaccccatacagcgtttatgaaacgtatttaccacggaccatggaccctggccggactggcatgcgccattctggccgcagtagccatgctttccctgttctcctgcggagaaaacggacaggcaggcaacaaaaacagacatcatatggacaacaaggatttaaaaacgatttatctggcaggaggctgtttctggggagtggaaaagtacttctccctgattcacggagtcaaggaaacggaagtggggtatgccaacggttccactgcctcccccacgtatgaggaagtctgcagcggacgcacgggccacgcggaaacggtaaaagtggtatttgatccggaagaactcagcctcccgttcctgctggaacaatactattccatcattgatcccgtttccgtcaacaagcagggaaacgacaggggagttcaataccgcacgggcatttattatacggatgagaaggacaagccgattatagaagcctccctgaaacggctccagcagcacttcaaacagcccgtggcgattgaagttcaaccgctgcgtcaattttcacgggcggaaaaataccaccagcgctatctggacaacaaccccggcggctactgccatattccgcccggcaagttccaggaggcggcccaggccagggaagccgctcccgtctaccggaaaaaaccggatgacgagctgcgccgcagcctgacgcccgagcaatttgcagttacgcggaacaatgcgacggaacctcccttccgcaacgaatatttcaataacgacaagcccggcatttatgtggacgttacgacgggggaacccctgtttctttccacggacaagtttgattccggctgcggctggcccagcttctcccggcccatcaaggaagaactgattcaggaaaaacaggatctttcccacggcatgcgccgtacggaagtccgcagcaaaacgggggacgcccatctggggcatgtcttcacggacggcccgaaggaccgcggcggcctgcgctactgcatcaacagcgcttccctgaaattcattcctgaacaggatatggaagcgcaggggtatggaaaatacctgccccagcttcgccgggaggcagcggacagaaaatccgcggaaaagtagctcacggaaaaaacggaaggcgaacctcaccaatccatcaatccgttaaaaatcaggaggacgaagtgtggccggataaagaaccggctctcggctccatgcaagattccatgcgcacttatgccgtaagacgggagacaggaaacaaagatgctggatgcggcgtcccatgcataagagattccggaaagggataaaagtagtactccggaagaagattcatgagggctccttcccgggccgcaggcagtcaatcaattccggtacgcctgcgtttgaaaaaaacaccctccatccatgccgctgccgatgaatggagagtgggcaatcggcagcaggccatggaggatttgggttgttggggcaatacgacttgcagcaaatgccgtttatcttcatgccgttcattgaaatagcgacggccaggcgcgttttgtgttaaaaaaatgagttttttattttcaacgctttcatccatctattgaaatcgtcccgattctttgaccatgaacatatcataaaaataaaaaccattttctgccagtgccggattcccctcacctgccacaagagggaggcaaggagctcttctccgccaacggtatccgccttctcctccgcgtcactgcacgatcgtgacgggagtacctactttaacggtcttgaaaagcggcacacaggaggagcgggtcatgcggatgcatccatgtgactggggcgtctggaaaacgggtcccacgtgcatgccgatgccgctgtccgtcagccgcatgaaatagggcatggaggcatcatataagttggagacgtggtgcaccgccttttccgtaatgcggaaatggcccacgggcgtgcggtgggaagcggtccccagacagacgggaaaatccatggctacttcatcccccaccatcagctggcccctctggcttccgcggctgatcaccacccgcgtattgccgggagtggcttttttcataatgtcctggttcatccactcgtcatgcacctccgtataatccaccccggccaccaccactctcgtattcggcccgtaagaagtcatgggcatggtcgtaggcacggtcaggggcaccatgcgcaaattctcttcctgcggccctgaacaggctgccagcgccagcgctcccgctgccgctcctgcaataattgataaggttttttttgcgttcatcatctttaaccctttcagaggattggacaatgccgcgaacttattttcaatgtttcatgacgcactctatcaaaattccggcatgcacgcaaaaggcggaaaccggaaaaaagcggccgtcacgacagcggaatattgcgcgccacggtaaacagggcaagtacggccacgccggcggtcagcaccctcaggaatacggtcttgtccctgatgaaaaacagcgttcccagccagatgagcgtgggaaccagcagcacgttgtaccgcagggaatcaagccaatggccatgaagcagggcatgcagggccctggtggaaccgcagccgtagcaaagataacccgtggttttatagaaaaggcactccggcagccagccggaccgggaagggtcatccaccagcaggagcaccgcgcatgccgcagccagcagcgccagatacaggaaaaacagtttcattccatgaaaaaggcctgcggatcttcggttctccgcaagccttggattcacgagcctggtgaagccttttatcagttgcgccaggcagtccagccgccgaccagcatcaggacgatgctgagaatcacggcaataaggctcatcgtcttgccgttgctcttgtcggggtatttgttgaggcctatgatgcccagaatgaggcctacgaggctgcataaaacggcaaagacgagggcacaaatggcaagcgtattgtttggtctttctaactcagacatattctttaatccagtttgatttttattggggtgcgcatagcaggatgccagacgcaaatccttgccatctaaacaaaatgccgtgcttctacaagtttttcctggttctgttgtcagttcctgcgcgtcttacaggcaaaaacgccggaaaaaaccggcagcacgcgtgcaaaaaggaatttccacgcttgcgggagagggggaaaaatcctccccccgtcacacagagtccttgccttatcatatttggcctgtatagtacccgcgactgccaggagggcagccgcctgtttacagttaaccctctattccgcatcatgaccaagattgccaagagcacgttcaccacgggaaccggaaccccgggacagttttattcactgccagccctgtcggaaaacggctatccccgcctgaaccgtcttcccgtttccatccggatcgttctggaatccctgctccgcaattgcgacggcctgaaggtaacggaaaaggatgtggacaacctggcctcctggaacgccaaaaatcccggttcctatgaaatcccgtttacggtggcccgcatcgtcctccaggacctgacgggcgttccgctgctggtggacctggccgccatgcgctccgccgtggccggactgggaaaagacgcttccgtcattgaaccgctggttcccgtggacctggtggtggaccactccgtccaggtggactgggcaggccgcacggacgccctggaaaagaacctcgacatcgagttccagcgcaatgcggaacgctacgaattcctcaaatggggccagcaggctttccagaccttttccgtagtgcccccttccgtgggcattgtccaccaggtgaatctggaatacctggcgcagggcgtcatggaaaaggacggcgtttatttcccggacaccctggtagggacggactcccacaccacgatgatcaacggcatcggcgtcgtgggctggggcgtgggcggcattgaggcggaagccggcatgctcggccagccggtcaccttcctggtgccggaagtagtgggcgtccacatgacgggggaactccgtgaaggagtgaccgccacggacctggcgctccatgtcacccagatgctgcgcagccacggcgtggtaggcaaatttgtggaattcttcggggaaggagcggcggccctcccgctggcggaccgcgccaccgtagcgaacatggccccggaatacggcgccaccatgggcttcttccccatggacgaacgctgctccgactacctgcgccagacaggcaggagcgaggaagccatcgccacgtacgaaaactacttcaaggcccaggacctgtggggaatgccccgcaatggagaactggactacacggttcagctggaactggacctgtccaccgtggaacccgccgtttccggacccaggcgcccgcaggaccacatccgcctggcctccatcaaggacagcttccgcaagctcgccggcatgcccgcggcggaaggcggttacggcaaaaaggaatccccggcggtgaaggtcaccatgcactctccggctggcgttcccgttccggtggaaggcttcagccaggaggcggaattgaaagacggcagcatcctcattgccgccatcacctcctgcaccaacacctccaatccgggcctgatgctcgccgccgggctgctcgccaaaaaagcggtcgcgctgggcctgcaagtgccgccgcacgtaaaaacgtccattgcgccgggctcccgcatcgcttcagactactttgcggccaaccagctccaggaatccctggacgccctgggctttgaaaccgtcggctacggctgcaccacctgcatcggcaactccggaccgctgaatccggaactggaacaggcggtcaggaacaatgacatcgtggccgcctccgtcctctccggcaaccgcaactttgaagcgcgcattcatccttccatcaaaaccaacttcctgatgtcccctccgctggtcgtcgccttcgcgctggccggacgcgtggacatcgacttccagacggaaccgctgggcacggaccgcagcgggaagcccgtcttcctgaaagacctctggcccagctccggggaaatcgcggaagccgtcgccaaatcccgcaatccggaagcgtaccgggaactatacaccatcacgccggacaaaaatccgcgctgggccgccgtgtatgcgccggagggctccgtcttccagtggaatgaaaactccacctacatccaggacccgcccttcttctgcggcttcaacggccagccccgcacgctggcggacatccgggacgcccgccccctgggcatctttggcgactccgtgactacggaccatatctcccccgccggagccatccgggaaacgggccccgccgggctgtacctgcaaggcatgggggtggacagaaaagacttcaactccttcggctcccgccgcggcaacgaccgcgtgatggcccgcggcaccttcgccaacgtccgcatcaaaaacctgatggtggacggcacggaaggcggctatacgctgtacttcggcaaccgctccattcccgccccggacaagaaaataacctctgccgccggagcccccgccttcatctatgatgcagccatggcctacgcgcaggacggtgttccgctcatcgtcatcggcggagaagactacggcatgggctcctcccgcgactgggcggccaagggcacgaacctgctgggcgtcaaggccgtcatcaccaagagctttgaacgcatccaccgttccaacctcatcggcatgggcgtgctgcccctcaacttcgccgacaaggcggactacgaccgcatcgccccgttgaaggacgccaccttctccatcctggggctggacaacggcatcgccccgcgccagcaggtcacgctgcgcgtgcagcccgcaaacgcggaggcgtttgacgtgcccgtcatcgtccgcattgatacgcccattgaaaaggaatactacctggcgggcggcatcctgcaatacgtcctcactcaaatcctcaaataacgcggcttggccgggcttttccggcgccgcatcctttccaggcgggccgcccttcccccgaaggcgcggcccgtctggcgccttcctctccgggagcacccgcagctccatgacacggcttgattagttcacttgaactaattccaaattctgcttgcaatccttccgggctgtttctagaacaaacacatggaatatagatctgtctggacgggctttcttgccgtattcgccgccctggcgttctgcagctgctcgcagaacgataaaatgagaccgccggccgtctccttcaaaattcaaaaagccccggtagtcccccgcacgtccaaccagatgggccgtgaggtgggcatccgcgtctcctacatgcccaaaagcacgtatgcccgcaggcatgcggcctccatgcgcccccgcttcatcaccatccacagcaccgccaaccccaagggagacgccaacgcccattcccgctacctgaacagtggcaaatcccgcagcctgaactggcacttcacggtggaccagttcggcgcgtaccagcacattcccacgacggaaacgggccaccatgcggaccactccggcccgggcgaccaatactccgtagccattgaaatgtgcgaatgcaccacgcacaatcccgtcgtcatctacaacaagacagccaagctggcggccctgctgatgatgcgctacaacgtccccctgcgcaacgtggtgccccacaactactggtccggcaagaactgccccgccccgctgatgaccaacggccgccccggctataaatggagctggttcatctcccgcgtggactattactaccgctgcctccaggccgggaaataatccctccccctttctgccgcgcatgccgcactcatgacaaggcgttctctttaccgtttccggcggagggtgcttcatgaagagtatgaaaatcatcacttcccccggagatacgcagcggctgagcaacggcctccccattcccggcatcggttacggaacctacctggccccggacgacacgtcgggaacccggagcattcttgacgcgctggaagcaggctaccgcctcattgacacagccagcgtatacggcaatgaaaaaacggtgggacgcgccgtcagggaaagctccattccgcgggaggaaatcttcatcaccagcaaagtctggaacacggaccagggttatgaaagcaccctgagcgcttttgacgcctccctgaaccgcctcgaaacggattatctggacctgtacctgatccactggcccatccccgccggatatgagaaggactacaaagagctgaacagggaaacctggaaagctatggagcgcctttacaaggagggccaggcaagggccatcggcgtcagcaacttccttccccgccatttggaagccctgatggaacaagccgataccatccccatggtgaaccagctggaaatcaatcccaggtaccaccagacggaagcggtcgccttctgccgggaacacggcattctggtggaatcatggggccccctggcccgcggaggcgtcctggaggaacccgtcctgcgccgcatcgcggacaagcataaaaaatccgtagcccagatatgcctccgctgggaactccagcgcggcatcgtgcccctccccaaatccgtgcatgcggacagaatcaaagccaacctggacattttcggcttctccctggacggagaagacatggcccttattgacacgctggacgcccccgggcactactccattcacccggaccatctttccgaggagtaatctttccagaaaagattcaaggacggactattctctccgcttcctggcggattccaccaggcgttgacgagcttcctgcctggcacggaatgcctgttcgcgttttctttcctccgccagcgccgctttcttttcggaatcacggagtttcccgtaaagcagcgggttcatggcggcctcgtcctccgggccttcatggtggtacacgggcagcccgtccgcagccagcgccacatggcagtaacggccgtcctccctggagtcccggccttttttatccagacgggaaagaatcacggcataccccagccccggagcgttcatcagcttccgctggtcgtcaaacagggcggcaacgcgcatgttgtcgtagtccagcttcatgatgccgcagaccattttgccctccgtattccagtacatcaccagcttcttttttcccagggaattgggcttgcacgtttcataggctcccttgacggggcggctttccatggacagggagtagtccgcattgctgtaggattttgtctcccttgcggcgagtcgttcgcccggaggaagcagggaggaaacgggagcgcgcatttccgtccgttcctcaggcatgtacttggagggaatgagcagtccttttccggtatcgtaataggcgtaaaggcttccctggtccagaaccatgtcaaagtttttctgccccctcccgctttccgggcgcgcctgcgggcggcagtattcctgaattcggaacggagggcccttgatggcggaaagggaggtggtacagaccagcccgtccaccttcctggttcccgtcaaggttctggtggggtttttccgggccgcttcattataccggggagtgatgtctttttccaccggcgtccacgttgttttttccagctccttcatcaggaacggccagagcatcgcggccagcttcaggtcccggcgcgccgccgtgcccgtcagggaagccgccagcgccgcgtcttcctcatccaggcggttcagcggaatttccacacgtttccgccccgttttaagcgccaatctggaacccgtgcaggattgaaaactgccttttaccacgtctccgagcttggatatccattcccgttcgcccggaaaggcatattcatcagccggcgcacaaaccgcgccgcaccataccagcacagcaagcagaaggagtttcatcgtcagggacacagggttgcaactgcaaccctaacaacagggccggccggataaaagcttttaattgaccgccgctgcatcgggaacccggaacaagaaaggagaaaacggcctcatcacatgtcatccggaggccatgcagggccgataagggccggaaggccctttttcccgggcgggagaccgtgacaaaccggggggaattggaagaagcaggggaaactgaatttggcttacccgggagtgagggtctcccgcccctcatcattcccgccaaccaggggcctcatgcctccctgaccgcgcatccggagaaaatcctcggaccgcagttattgcttcttcccttttttaggagccgcctctgccgttttagcgcttcttcccgcgcctttcccggcagttttgggcgtcctggccgttttggaagccgaagctttttccttgtcttccgacttggccgcagcttttttagccggatatttcttttcccggggcgggaattcaaagccgatcttgcccgtcttcgcattgaagaccagataagcgtcaaacgggcgcttggtgcgctgggagatgaagcccttcatcaggtcggactttcctttcgccagaatcttcaacacctggtccagcgggatttcacggcccaggatggtgcgggaaacggagacggcggcattttcctttccaatggccagggaagggactttccaggccttggccgtttccatcacatcgtgttcccccatgtccgggatggtgacggaggccactttcacggcttcctccgtcccggcggcttcgtcctcctcccgtgccgggaagtagagcgtggcgcggaacttgtcgttgagctccagccccgcttcaaagggtttgccgaaccgggaggtgaatccgtggaggattcccgtcttgccgtccacaatgagggttttcagctcttcatccgtcatgtcgcggccggagatgaccttgcggatgctgaacttgcaggaacggcaggaaacggcgtccagcgtgtttttcaggccgtgggcatggcaggacgggcagtccagttccatttccggcagttccacctgctgctgggcttcccggaagtctttcaccctcttcacgatttccccggtcagagtcttgatgccttccatgaaggagtccctcggcagggcggcctgctccatctgcttgagcttgtattcccattccccggtgaggctgggggaggtaagcgttttcagcccgatgcgttccagcagggcgatcagttcaatcccgcggcgcgtcgccagaagctcgcggccgtcacggacaatgtattcctgggaaatcaggccttcaatgatggaggcgcgggtggcgggggtgcccaggccgcgttcgctcatggcggcggccagttcttcgtcatgcaccagctttccggcgccttccatggcggccagcagcgtggcttcattataccgtgcgggcggcttggtcatggcgttgcggatttcaatttcacgcacggcagcctgttccccgtcatggacgggcaccagctcttccttggaggaactgcccgccttgcgtccgtagacggcctgccagcccggttccaccagcacgcgccccgtggtgaggaaggcgtccgtcacgccgccctggtgggcaatgagcgtggttctgcgcgtgtcctcaaacacggcgggggggaaaaagacggccaggaagcgggccatgaccatttcaaagagtttctgcgcgtctccggtgagcttttccatcttgccggtcgggatgatggcgaagtggtcgcttacctttttcgtgtcaaacacgcgccggttgggcttgatgcgcttgttgtccaggatgtccttcgcaaaagtggcgaattccgggtcctgttccgccaccgtgcccacgatgccgtaaaccttgcccagatagtcctccggcaggtagcgggagtccgtacggggataggtgagcaccttgtgcttttcatagcactcctgggccagctgcagcgtgcgcttggcggaaaagccgtagcggttggcggcttccctctggagggaggtcaggtcatacaacagcggggcgatggttgtgacgggtttcttttcctccgtcaccgtgccggatttgccgcggcagcggtcgcggatgacggtcgcctgttccgggtcccagatgcgttccgcgcgggactgcgggttgtcgtcctttttccagtcccggtcaatccagcggccggagtaggagccggactgcacgccgaattccgcccacacttccgaatagggcaccggttcaaacgcctggatttccagttccctctgcgtcagaatagccagcgtgggagtctgcacgcgtccggcgggggtgacgttgaagcctccgcgggattgcaggatggtaagggcgcgggtgctgttcaggcccaccagccagtctgattcggaacggcacacggcggcgttcgtcaggggctgcatgtcggtctcgctccgcatgctgtgccacgcattcaggatggcttcatccgtcatggactgcatccacaggcggcgcgcaggcttggtccattttccgtaacgcaccaggttgtggaaaatgagctctccttcgcgcccggcatcgcatgcgttgacgatttccgtcacgtccttgcttttggcgagctggagaacctttttcaggcggtcttccgactgcttgatgggttccagttcaaacgtcctggggatgacgggcagatagtcgaacttccatggcagggacttgccgccctccgtcatgggcttcttctgttccagcaggtggcccacggcggacgtgatgatggcccggtcattctggtaaaacgcgccggatttgtcccgggtgaatttcccaagctccttgccgaggactctcgccagatcagtggcgacgctcggcttttctgctataattaacgttttggacatatcggcggctcggaaaaatagaagtggtaaacagtggcggcaacctttcccgcatctgcggcgcgttgcatttggaggtgaattcctactcccctaccccccatgcttgtcaataaccaattatgtatttacgggaaaagcgagcttttatgtcagaataacggattttcccgcctccattttccggaaaagccgcgctggcaccttgccagccatcttacgccatgctatttgtgggatgatgaaaacgagccttcctttcgtcctgcttcccgcctgcctcgcgctgctgggggcctgttcccccacgccgtccgaccgcatcgcgaagaatatgcaggcctatgaacagcttccgaaggagcagcaggccaaagtggcgcgcggagagctggaaaagggcatgtcccccatggcggtcctgctggcatggggggaacctgaacagaagatggcaggccggatgaacgggaagaatacggaacggtggatttacacgcggagcggcacgggctggtccgtgggcctgggcggaggcggattccgcagcagggattccggggtaggcaccgggataggcgtcacgatgcccctgggcagccgtccgcccgtttcctataatgtcctgtttgaaaatggaaaggtcatcggctgggaagccgtcaatggcttttaaacggcatttccccggataacgcttttccatccgttccgccccggcatctcccgcggggcgcaccgtttttcctatttgccggcggccttgacgatggcctccaccaggccgttgatgtcgtgcgttttcgcggtaatcgagggtgcgcgccccagctccttgagggttgccgtggtcacgggcccgatgctggcggccttgcagccgtccggccatggaagccccagcttgaaaaagttttccgccgtggaggagctggtgaacgtcacgatatccgccccccgctcccggaaagccgcctgggctcccgccacgtcctccgtttccgcttccgtcctgtaggcgatgcattcgtccacaatagctcccagagcggtcaggccgtcgtaaatcacgcgccgcgcttcctccccgcgcacccacaggaacgtgctgtgctcaatggttccgatttcctcgcgggcgtccttgaaggccttgacgagtccttccgccacgaattttttaggcatgatatccacggccagcccatattcccggagcttcgcctccgttccgggcccgatggccgcaatcctggcgcctccgatgctccggatgtcctggtacacggcaaaaaacgcctggaagaagcgttccaccccgttggggctggagaacaccagccagtcataggtatgggcgtgcaccacgccttccgcaaattcccgcttgttggaggggggtgccatgcggatagtgggcatttccagcacttccgcacccagacggcgcaggcgcacgctcaattccccggcctgggcgcgggtgcgcgtcaccacgatgcgcttgccgaacaggggcagtttttcaaaccagtccaggctgtcgcgttccttcaccacatccccgatcacgaccaccgcaggggcgcccagcccggccttttgaaccttggcgggcagcgtccggacagtgcccgtgaccgtgcgctgaatgcccgtggtggcccactggatggcggcggccggcgtggacggctcctgcccgtatccggtcagggcttcgcagacgtccgccagcttctgcatgcccatcagcatgattttcgtgccctgcgctccggcgattcctttcaggtccagggaagattccttcttgttcacgtcttcatggcccgtgaatacggtaaattgcgtgcagtacttgcggtgcgtcaccggaatgcccgcataggccggccccgcaatggcggaggtaatgcccggaatgacttcaaacggcacgcccgcttcatgcagggcgtccgcttcctcccccccgcgcccgaagacgtagggatcgccgcctttcaggcgcaccacttttttcccggcgcgtcccagcttgaccagcagggcattgatttcctcctgcggcagggcgtggcgggaagcccgcttgcccacaaaaatcctttcacaggcggcaggagcccagttcaacagttccgccgagctcagcgcatcatataccagcacttccgccgcttccaccagttcccgcccgcggacggtcatcaggccgggatcccccggacccgctccaagcaaataaacaataccctgttgcatgctgtcattcaactccatcacccgctttttggcgacaataaaccccgccatgcccggattcattccattgatggcagaattgtcacaagacatccacaaaagattcttgttttttgaataaatacaattatcacgtatttatgaatatttcacgtatacttacgaccactctcgctgccgcattcacccttccggctttggcggatattccggcctcccgagttcccgcccccgtgaaggaacaggtgcagaagcagtatccgaacgccggcgccatcgaatgggatttcgacaacgacgaagacgtttacgaggcggaattccacctcaacggcctggaatacgacgtcaagctttatccggacggcaccgtctgcctgattaaggcggacatgcgccttcaggatctgcccgcccccgttacggcggccatcgcccgcgatttcccggggtacgctccccgccgcgccaagcagatcaccgccaggggagccctgaagtaccgggtggactgccggtcagaaaccaccgccgtccgcaaactggagctttactatgccccggacggcaaacttctttcccagaaggcggacgattgaatgcaccgttcttccgcatgtttccgtatgacagaagccgggggaacctcccccggcggctgacacggcgccctctggattcaacaaagccttatgatataaggtcaaacttgcaatgattgaattattcaataccgacttcctttcctacacggcccaggcggcggaaaccgccccgcagcattcctataccatttactggatgattctgctgggctccatgcttctgagctggctggtcagcgcgcgcatgaagagccgtttcagcgaatattcccagattcccattccggtgaccgggcgggaagtggcggaacagatgctgaaggacaaccacatcacggacgtgaaggtgatttccacccccggccacctgacggaccattacaatccggcggacaagaccgtcaacctgagcgagtccgtttacaattccaacagcattgccgccgcggcggtggcggcccatgaagtggggcatgccgtacagcacgcccaggcctatcactggctgggcctgcggtccgcgctggttcccatcgtccagttctcctccaatctggtgagcatcgtgctgatcatcggcattatcctgctggccatgggcggttccccgtgggtgctggggctgggcatcggcctgtttgccatgaccaccatcttcgccttcatcacgcttccggtggagtttgacgcttccgccagagctctgaaatggctggaccgttcccacctgatgaattacttcgaccacggaaaggccaagagcgccctgttctgggcggccatgacctatgtggtgggcgcgctttcctccctggccatgctgctgtattacgtgttcatcttcctgaacgcgcgcggcagggaataacccggggcacgggcgcagcggcatacggggttccagcccatgcggagaacgaggcttttcaggccctccctccgcaggaaaacctctttcagcctttttcccgaaagacggggagcacggaaacgtgctcctcttttttaacgcatcaggcgcgggcagcggtcccatgcaggggtccgtcttcccgcgccttccgcggcaggggtattccaggcgtttccgttccagcctcgtgccctatgcttcttccgggtgttcctgtttcctctttccggctgtcaggcggaagaagaggggaaccaggaagatcgccagcagggtggccgtaatgatgccgcccagcacccccgtgcctacggcgcgctgcgcgcccgccgccgccccgtgggcgaaggccagcggaaccaccccggcgccgaacgccagggaggtcatcaggatgggcctcaggcgcagtttggcggcggcaacggcagcttccatcacatccatgccttcccggtagaattccttggccacttccacaatcaggatggcattcttggcggaaagaccgatggtcgtaatcaggcccaccttgaagtagatgtcgttgggcatgtcgcgcaggaagacggccagcagggctccgagcaggcccaggggcaccaccaggatgaccgccagcggaatggaccagctttcatacagggccgccagcaccaggaagacgatcaggatggacaggccgaagagcagcgtggcctgggacccggcaagcttttcttcataggactgtcccgtccattcaaatcccacgccctgcggcagggtggcggtaatctgctccagggcgttcatggcgtccccgctgctcttgccgggcgcggaggagccgttgatggtgaaggaggggtagttgttgtagcgcgtgagctgcggggggccggccgtccagtccagccggacgaaggaggagagaggcagaagcttcccctggtcattgcggacatgcaggtcttcaatgtcattgccgttcaggcggctttttccgtccgcctgcacaatgatgcggcgcacctggctgtcatgcatgaagtcccccacatagctggacccgaacatgaccgccagcgaattgctgatttccgtaatgggcactcccatggagaaggctttttcccggtcaatggagacgtgcagccgcggcgtgtccgcctgtccggagaagtagacgcccgtcaggttggggtccgcattggcgcgggccaggagttcgtcccgggcttccaccatgcgggcataccccaggccgcccttgtcctggaggcggaagtcgaagccggacgtgctgcccagttccggcagggacggcatgttcagggccatgaccatcatctggcggtccccgccaaaacgggcgttgacccggtcaatgatcgcctgggcggagttgtcctctccggaacgctcgtcccagtttttcaggccgacaaacagcatcgccatgttggtgccggtgcccatgaagctgaagccgcccacggagtaggcgtattccaccggttcatgctgcatcaggtaatcctccacctcccgcagccgggtgctggtttcctcctgcaaggtcccggcaggcagggcaaccatcgccatgaagttgccctggtcttcttccggaaggaaggaggtgggaagcgtgaggtacaggtagccggcccccgcaatgataagcacatacaggaacagggagcgtacggggcggcggatgattccggatacggcattgccgtaccggtccgtggaccggtggatggtcctgttgaaccatccgaagaatcctttcttttcctgatgctccacggaggaggctttaagcatggcggcgcacagagccggagtcagggaaagggccagaaacgcggagaaggagatggatacaatgagggtcacggcaaattgccggtagatgttccccaccgctccgctgaaaaaggccatgggcacgaacacggccacgagcacggcggtgatgcccacgatggcgcctccgatctgcttcatggcttttaccgtagcgcgccgggcgtccagcccctcctccatcatgatgcgttccacattttccaccaccacaatggcgtcgtccaccagaatgccgatgctgagcaccatggcgaacatggtgagcatgttgatggagaacccggagagccacatcaccgcaaaggtgcccagcagggccacggggacgacgagcgtgggaatcagggtggcccggaagttctgcaggaacaggaacatgaccaggaataccagcagaatggcttccagcagggttgaaatgactttctggatggagatttccacgaaatgggtggtttcatacggaatctggtaggtgacgccgggcgggaagtccctggccagctcatccatcttggccttgagcaggcccatggtttccacggcgttggagccgggagccatcttgatagccatgccggtggcggtctgcccgttgcagcgggagaagaacgcgtagctgttggagcccagctccacccgcgccacgtcccccagcttgacggaggaaccgtctgaaagcgttctcagcgcaatggaggcgaattcctccggcgtgcggaaggcttcctccgccaccacgctggcgttgatgggggcggatttggaaacggccgcccccccgatgtcaccgatgatgatgcgctcgctctgggcggccacggcattcacgatgtccgtgggcgtcagccccagcgcttccagcttttccggatcgggccagatgcgcatggacgtttccgcgccgaagagctccacgcgcccgacgcctttcacacgcttcaattcagggatgatgcgcgcggaagcccattcccccagttccgtatcattcaggttccccgtggaggaaagggagatcatcgcctgaatgttgttggaggatttttccacgaacactccttccttccggacagattccggcaggcgggattccacgattttcagcctgttctgcacttccacggcggcaatgtccgggtccgtgccctgcgtgaacgtggcggcgatttccaccgcgccgtcggaactgctggtggcggacatgtacatcaggccgggagctccgttgatttccttttcaatcacggcggtgacggcttcctccgtatcctgggcggaggcccccggatacgtagtgcgcagggtaatgaccggcggagcgatgtccgggtactgggcaataggcaggctgggaatggccagcagcccgatcagggaaatcaggagggcgactacccaggcaaaaatggggcggcgtataaagaaatcaggcataacgggttattgctgggcgttggattgcggctggggcgcggcgctgcggaccttcatgccgggccggagggacatgatgtggctgacggccaccttgtccccgtccttgaggccttccgaaaccagccattcccggccgttcagcgtatccgccttcacggggcgcatttccagcacgccttccgggcccacgacaaagacggaagccccctgcgcggtgcggatgacggcgtcccggggaatggcgaacacgttgtcccgcaccgccttctcaaataccacgcgcacataggcgccgggcagaagctcatagtccggattggggaactgggcccgcatttcaatggtgtccgtattcgggtccaccgccatgtcggaaaagatgatcttgccggaatgggggtattcctccccattggagagcagcaggcgcaccttgatttcacccagcggcactcccttccacaggccggacaccacggcgcggcgcaggctgctgtactgggaggccggctggcagaagcggacatagatggggtctatctgctcaatggtggtcaggtgcgtgaattcgttctggttggcaaatgccccttccgtcaccagcgcgcggcgcacgcggccggagatgggcgcttccaccctggtgtattccagattcaggcgggcctgctccagagacgcggcggcggcggcatattccgccctggcccggtcttcctccgccatggcctgcttgtgctcccgcacgctgacggcgcccttggccaccagggaggaatagcgggcggccttgtcctccgcatccgccagcacggccttggcgcgcgctaccgtggccttgcattcgtccagcacggcctggagcggagccggatctatcttgaagagaaggtcgcccgggcggaccgtctgcccttcctggtagcagcgttcctgaatgattcccgtcacgcgggcgcgcacttccgcctggaggtacgcctccatgcggccgggaaggttggcggttacgggaacctgggtgccgtgcaccgtgagaacggccacttccggcacgatttctccgggagaaccggcggccggattttcatccccctgccggcaggaggagagagctgccaaaagggtggtgcagagaagaaggagactagttgttttcatcagtaatcatgctttataagacctcaagaaaccccggaaccacgcttccgacaagaccggggatttttcaattgccataagatgtaaagtatcccataatgggagagtcaagaggcaatgaaaagattaagtggagcggctttttatcatttgttgtaagctgctggcaacaagaatcaaatgaatgacgcgacgatttcgtcttcaggaagatttctcttgcatgcagcagccgtttccgccgggcgcgcctccggcgggaaaaaatcagtttccacgccaaccgcaatacaggatggacaagcagaatttactaaccataggcaatctgtccaaacagaccggcgtacatattaaatcactccggtattacgagcagctggggattctgcgcccggcccatacggacccggatacaggctaccgttattacaccctctcccagattcccgtggtggacgccatccgcgcctgcaccttcctggacattcccctgaaggagttcacctcctttctgaccgaggaccagcagagaatccattacaagaagctgatttcccacggcaccatgctggcgcaccagaaaatcagggacattcaggagaaactgcacctgctggaaaaattccagaagcagatggaccggatggaaggcctccggcgccatgaggggcagaccgtccacgccctgccggaaaaatattgctggacggctccctatgccggaaaacagcacagcacggattacaatgtactcatcaccaacatgtttgatgacattaaccgcaatgagctgaggctgggcgcggaagccggactcctttccttccaccggagctccggaacggaaaggttcctgtatgtggaggtggaagcgaccaaaagggacgcccggcagttaaaggaagtcgtgcgcctgcctgccgcctccttcctctgctccatcaggaaggaaagcgatatcgggaaggcccccctggtctttcccgaactttttgcgcaggagtatgataaaatcatcatggaaacggaattgttttccggagactacgatgtggtgcatcccaaattcgaactgagatgctcccttccgccggaagggaagtgaaccgggggattttttccggaacaggcaatgggtgaagaggatgtaaaaaacgcctttcgggaaccggagttccccgtccgcgcccctgccgccctgcggtgcagccggaacgtccgttcaggcccgcaggcatgaagtctccggaagtttcatgaaatggcattgcatttccccatgcagcatataaaataatggggtggcacattgcgacactacacaaccggacttgaaggaaagcgccgtcaaggcttacaaggccatgttgctggcgcgggcctttgacaccaaaatttccagcctgtataaagcgggcaaaatcacgggcggcgtttacctgggccgcgggcatgaagcgattgccgcctgcggcggcgttttcctgaccgccgggtatgacgtgatcgccccgttcatccgggaacaggcggcgcgcatcacctggggggaaccgatcattgaagcggcccgctcctacctgggctctgccctgggctatatgaagggacgggacgggaacgtccaccgcggactgccggcggaaggctacatggcgcccatcagccatctgggcagcacggtggccttcgtcatcggctgcctttttgccaagcggctggacggcaagcttcccggccccgtaggcgtggccttctgcggagacggcaccacgtccacaggcgcctttcacgaagccgccaacatggcgaacgtggaacaactgccgctggtgctcgtggtgaccaacaatcaattcgcctattccactcccaatgtccgtgaatctggggaagcctccctggcggacaggggccgcggctacggcttcaccgtgcatgaaacggacggcacggacttcatggctacgctggaagccttccgcaccgccgtcaacaacgcgagggaaggcaggggcccccagtgggtgctggccaagaccctgcgcatgtgcggccacggggaacatgacgacgcctcctacatccccagggaattgaaggatgagtacgacaaaaaagaccccgtcaccgtcgcggaacggcaactgctggaagccggctggctgacgccggaagaagtggcggacctgaaaaagcagtatgccgatgaagtccagctggccgtggctactgcgcagagggaaccggagccggaccccttccgggaggactggaacgccacggtgtggagaccttattaagcctgcaaacggaatattcccatgagcgtaacatacattgatgccattcacgacgcccagaaagacctgcttgcggaagacaaggacgtcttcctgtacggacaggacataggcgttttcggcggcgctttcaaagcgaccaagggcctcaaggagctgttcccggaccgcgtgattgacgcccccatcagtgaggacgccatggccggcatggtcaccggagccgccgtcatgggcaagaagcccatcatggaagtccagtttgccgacttcagcaccattgctttcaaccagatcgtcaacatggcggccacccattactaccgcacgggcattcccgccaacatcacggtgcggctgccctgcgggggaacgcccggcacgggtcccttccacagccagagcctggaagccctgttcgcccactatccgggcctgcacgtcatgaccccggccaccgtggcggacgcctactggatgctgcgccaggccgtggaagtgcccgatcccgtcatcttcctggaacacaagttcctgtaccgctggctgaaggcggaggacaactaccgggaagccccggtgattcccttcggcatggcccggatcgcccgcaccggaaagcacgccaccgtagtggcgtacagcgccatggtgccggaagccgtgcgcgcggcggacctgctggcgaaggagagcggttatgaagtggaagtagtggacctccgcacggtgcgcccgctggacatggacaccgtcatcgcctccgtagcgcgcactggccgcgtcctggtcgtcggggaagacttcccgtgggggggcgtcacgtcggaagtcgtttcccgcatcgtggcggaaggcttccatctgctggacgctccgccccagcggctcaacgccagggacacccccatcccccagcatcccaacctgtggaaggcgcaccgccctacgctggaatccatcgccgcctccatccgccatcttttatccatctgattcaacccagtttccaccatgcctaaagtacccattctgatgccccagctcggggattccattgcggaagccaccgtgctgcgcctgctggcggccccgggcgacaccgtagaagccgaccaggaaatctttgaggtagagaccaacaaggccaccatgggcgtcaccaccatgtgcggcggcgtcctgagcgacgtgtttatcaaggaaggggaatccatcgtggtcggcgcctgcatggccatgattgacgccacggaagaggaaattgagcgttccggggccaccccggccggtgactccacccagccttcccttccggccagcccggaatccgtgccccagcgcgtcccggacgcttccgcccgggaggaaaagcccgccggggtccactttggcctgacgggggaatcctaccaggaaaacggcacggacctgaaagtccagcccagcgtgcgcggcctgccggtgcccgccggcatgaaaggcgcgcactacatgtccccccggatgaaggcgcgcatggatgaactaggcatgagcgcctcggacatcgctttcatctccggctccggagccggaggacgggtcaccattgacgacctggaggaattcctggaatacgtgagccagtggccgcaccgcaaggcctcctccatgcggctggccgtggcggacgccatgcgccggagctggacgcgccccctggcctccgccgggcgccccgtgttcatggaccccctcatcaagcacaggcagcattccccgctgcggcccggcatcaccctgtactttgcccgcgccctggccctggccctggcggaaagcccggaatgcgccggctacctggtgggggaaaacatcctttcccccaaaaccattgacatcggcatcgccgcccaggtggcagacggagtgatggttcccgtgctgcgccgcgtgaacgaacggacgatggaagaactgctggaagactacaacaggctgatcgcccaggcgcgccgccgcaggctggccccggaagacagcacgggcggcatcgccacagtcaccaacttcggcggcttcgggctcacctttgccgcccccatgcccatgcccagcgaatccatcatcctgggggtgggagccgtcaccaagaccccggtctggagcgacgaggtggaggcgttcattcccatctccaaggccaacatcgtggctacgggggaccaccgcgtggtggacggcgcggacatcggccgcctgctcaagcgcgtggcggaactgctccagcgcccggaatacctgtaacccgctccgttcccacacgctttacgccgcatgacgacagacccacccgtactaggcctggtagccggagacggcgtctacccggaatacatcgtccggggggcgcgccgccggacgccggagctgcgcatcgtggccgtgggcttcaagggggagaccaatcccgccgtcattcccctgtgcgacgcttaccaggaattcagcgtgggccagatcagcaagccgttctccttcctgaaaaagcacggcgtgcggaacgtcatcatggcgggaggcatcaacccgaagaacattctctccctccgtccggacctccgcgccctttccgtgctgatgcgcatgccggagaaaaacgcggactccctgctgggggccgtcatcacggaggcggaaaaagaaggcttcaccatcctccccgccttcacctacatggaagagcacatgccgcagccgggccacatcgccggaccgcgtccctcgaccgaacaatgggaggacgccgttttcggcatgcagatggccaaggaaatcagccgccttcacatcgggcagtccgtcgtcgtgcacggaggcaccgtagttgccgtggaagccattgaaggcaccaacaactgcatacgccgcagcggcgagctgggcaacggcaaacccgccacactggcaaaagtggcgcgcctggggcatgacatgcgcttcgacattcctacgatcggccccgtcaccattgagacgtgcgcggaatgcggcgtcaggcaaatcgccctggaagcgggcaaaaccattctgctggagcgtgaccgggtggcggaactgtgcaaaaggcacaaaatcagcctgcatgccatggacgcttccggggagggctgccctcaaccggaaaatcccgcccaataaaaatcccctcgtccggaaacccggacaaggggaaatcatgccgcatacgggatgcagaatagaaaacggcttattcaaccgccggaattaagcgtttttgtccttgtccatcatggacttggccttgtcacttaccccggaagccatatccttgacgccttccttgctcttttcgtaggcgtctttcattgccttcttgccttcttccatcttgccggaagcggcatctttcgagcatccacagccttcatgcatatggttcatatgatctttggagtcacacataataaataaatggtttgtattttaatcgtttgagttaaccgtttttcgcagcgtcgccaatggcttcggccttatcggcagccctgtccgccgcatggtccacggcttccttgctgtcttggtaagtatccttgacggcttccttgctcttttcgtaggcgtccttcgccgcttgcttgccttccttcattttttcggaagcggcgtccttggcggctttggcgccctttttcatgtgttccttggcttcagccatgtccttgtcacccttggtgcaggaaccgctgttgcaggcgctctgcgccagggccactaccggaactgcaacggctaccgctgctatagcatatatcaattttttcatgacgttgttctatttggattcattccaatagactctttcttcatgaaaatctatgaatacagtcgtgtcattctgcgttcactcctgcaaatcaaaagccataaacgccgcggaggcaacgcagtcccggcacggaacgcagccttcttttttcagctccctgcaatgggaataacccagcttctccacaaaccgccgcttcagctcctcccttgactgcacgggcgtgcacaggagcgctccatacaaggcgccgcataccccgtcaggcgctcttcccgtgccgcacgcggagacggcttccagcaaatcctcccttcccagggctgcgcaaacggcctgggcgcaattgtggcgccagggttccgtgcggaaggtggacagcgccttttcttcaacgttcatgcccccactgtaggcccggcccccttccgggtcaagagccccgtcccgccttaccacctgcaaactccgccgccgtattccgggtgaggaaaacataacccctccggaaaaccgccggcagcggcgtttacttcccggcaagccggcggctggtctccaggcgcgcagccagctcctcaaaggggacggtcccgtccaggcaaaggctcacccagcttttcttattcatgtggtaggccggaaaacggctgtgatggtccacaaggccctcgagctccccagggcggacccgcagattcagcacctccaccctttccctggaactgccgcccagtttcaaccgcggcacagccagaaaaacggcataccatttttccgtgtccttccgccgcacgacagcgcttcccggcgacttcctccacaggaattccaattcatccccgtaagcctcccggacgtgcgcgacgaggctccgggcaggatcgcccttgaagaaatcaggttcaaagcagcactccgccacatgccacagctcttcctcatattccctgcggagcgccctctcccgcaacctgtccgcctctccctgagcaagatgaggaatactcttcccgtccgcatcacgcaccgttacgctgacggaaccctccgcatgtatttcaaattccatacagagctgcccgttcagcagctttgtccggtacagaaaaccattttccccgcgaacgcagccgaagggaggcaatttttcctcacacaacctcctgtccctgaaaacgcgttccacggctttctcataccagcttttccggggaatgcggcgaaagaacatgaggaaaagaagttaaaggagatggaaggatggaaaacgccagctgcgcccctgcgggcgtgcagaacccggccaagccatgataaatccgcacgggaacggtacaaggccaaaataacctgcgccccatgtccggggcgcccgcatcgggaaaagagtttttacctccccgtcagcacataccacacgaacaggctgttatgcttcacgtaccgcttgagcagcctgcccggctcccggtaaatgcggtatagccattccaggccgtttttctgcatccaccggggcgcgcgcttcaccgttccggcatggaaggcgaaggccgctcccacgcccacataaaccgcgggaggcagcagctccttctgctccgccatccaccgctcctgcttggggcagcccaggcccacccacaccacattggccccgcttgaggcaaccgcctcccgcatctccctccggtcttcctccgtccaggaacggaatggcggggaatgcacgccggccagatgaaaagccgggtacttctccttcaatgcggacgccagggtctccagcgtcccttcatctccgcccagcaaaaaatggcgcagacccggatactccgcattcgcccgcaccagggcttccatcaggtccggcccgctcacgcgttcggcgctcctttcccctgcgggaaggcccctgttcagcttccacaccacaggcattccgtccgggcaaaccacgtccatccgttccagcacggccccataaccccggtcatgaacgccgagggttatcacgtgcgcgtccgcggcggccaccaggcacggggcctgcgcttccagggcacgttccgccagggcagagctcatttcctccacggagctgacggccacggaaaagccgaacacctttctggtctcgcacggcatccgcgcgccgggctggtcaggattgtttgcagcagtcatggcctgatggaaatgaagggtgaaaatcacggcagggacagcctcagcccgtcgtaggcaggcatgacgttctccggcagcttgccggaaagaatctcgtaatccatgtcgtgggacatatgggtcagcacggcgcgcctgggccggatggcggcaatggcggccagggattccttcaggcacaggtgcgtggggtgcagatgatagcgcagcccgtcaataatcagcaggtcaacccctttcatggcctccagggaggcctccgggatgcttttcacatccggcatgtacgccagccgctgcccttccgcctccagcacgtaggcataagtctccactccggcatgcattacgggaagaggcgtcaccagcacattccctacacggaacggctccgtcacctcgtgaggttccggcctgacatagccgctccgggccgttttgggttcaaacgcccagccgtacatggtccgcagggcttccatcgtctgcggtgaggcgtacaggggcaagccgccggacctgcgccagcagaaggcgcgcagatcgtcaaagccgcccacgtggtccacatgggcgtgcgtgtacagcacggcgtccacgtccgtgatgttttcccgcagggcctgctgacgcagatccggggaggaatccagcagaatgcgggtgcccgcggcctccacgtaaactgaagaacgcaaccgcttgtttctggggtccggggacgtgcagaccgcacaggagcaacctatctgcggaactccggtggacgttccggtgcccagaaagagaatgttcatcacagaggtcatgattgcgtttagagcaaatgatgccataatgcattcaaaatccaaagcccgaatgcttacattgctgaaaattagaaacctggccctcgtggaccagctgctctgggaacccagctccggtttcatctgcatcacgggggaaacgggggcgggcaaatccgtcatcatcggcgccatacggctggcgctgggggaacgcgcggacaaaacgctcatccggtccggagaacagcaatgcagcgtggaagccgtgttccatctgccggaatcctcccccgtgcacggcattctgaacgaacacggcgtgccgccctgtgaagacggcaacctgattatcaagcgcattatttcctccacggccaaccgccagttcctgaatgacagcccgtgcaccctgaacctgctgcgggaggcgggcgcctgcctggtggacatgcacggccccagcgaccaccgctccctgatctcccaggagagacagctttccctgctggacgcctttggggagcacgcccccctgctgcacgcctacgcggacgcgtggcggcaatggcaggacgcgcgccgggcctatgacgacctggagcatgcggaagcggccaccgcgcgggaaatagagctgctgcgccaccaggtggacgagatagacgccgccgcctttacgccggaggaagtgctcacgctggaagaacgctggcagcgcgcccgcaacggcaccaggcttcaggaacaggtttccagaatgcttgccatgctggaggaaacggacgtgcccggcctgggttcccagttgagggaactgacccgggcggcgcacgaactggaacgcatggacgcctccacagccgcgtggctggccccgctggcggaagtgaatctggagcttaaggaaattgaaggacgcctggcggattattcctccgagctggattgtgatccccgggagctcttccaactggaggagcgcatcaacctgctggaatccctgaaaatgaaatacggcccttcctttgaagacgtctgcgcccggagggaggaggcggcccaccgcctggaccgcatcgagcaccgcacggaacgcctggaagaactgcggacctccatggccgtcctgcgcaagcaggtggacgccgccggacaggccctgaccaaagcgcggcaggcatccgcgcccaaactggcctcctccatcgtcaggcactcccgggaactgggcttccgccaggccgtctttgaagtagggctctcccccctccaggaacccggctcccagggaatggaaacggtggaattcctgttcggccccaatccgggcgaaccctccaagcctctccggctgattgcctccagcggggagctggcgcgcatcatgctggcgattaaaagcgccctggcgcacaaggactccacccccctgctggtatttgacgaaatagacgccaatgtgggcggggaagtggcgcgggccgtcggcttcaagatgcagcagctcgggaacaggcaccaggtcatctccatcacgcactttccgcaggtggcggccctggcctcccatcactacctggtccagaaggcttccgcgggcaaccgcaccatctcctgcttgcgggaggtgagccatgaagaccggatagacgagctggtccgcatgctgggcggcggcggggaccacgcccgcacgctggcccaggccctgctgcagccctcctgaacggagggcgccaaaaaggaagaggccgccttatttttccagacggggcttgaagccgcgcagccgcagggaattgaacaccacgcacagggagcttaaactcatggccccggcggcaatcatgggattcagcgtaaggccgaaggccggatacaggcacccggcggccagcggaatgccgatgatgttgtaaaagaaggcccagaagaggttctgcctgatgatgtgcagggtggtgcggcccagttgaagggcttccgccacgcccacgggattgctcttcatcagcacgatgtcggaggactccatcgccagctccgttccggacttcatggagatgcccacccgggcgcaggccagcgccggggcgtcgttcacgccgtcccccaccatcgccaccttgtccccgcgttcctccatcttcatcacatgggaggccttctcatccggaagcacgtcggaaatcacttcatcaatatgcagttccccggccatgtgccgcgccgtggcggcattgtcccccgtcagcatgaccacgcgcaggttcatccgcttcagataatccaccgccgcccggctgtccggtttcagggaatccgccaccatgatcactcccgcagggcggtctcccctccctacatacagcggggacgcgccctgccgcatgaactcccggaggcggccttcctcctccttccaggagatgcccttgtcctgcatgaagccgggattgcccaccgcatagggcacgccgtccactacgccggaaatgccgcggcccggcacaacggacaaatccgccacggcgcggatggggagttccagcagcctggcgtgttcataaacggctttccctaccggatgttccgatccctgctccaaagccgccgccatttccaccagttcatccgcattcatgcccggctccggcagaacggccaccacacggggctccccttccgtcagggtgcccgtcttgtcaaaaacgacggtatccacgcggctcaaagcctccaaagctccggcggacttgcacaggatgcccagccgcgcgcccctgcccgtccctaccatgatggcgatgggcgtggcaagccccagaacacaggggcaggaaatcaccagcaccgcaatcgccctggcaagggcgaaggaaaatccctccccggcagccagccacgcaaccaacgacaccagggcaatggcaatcaccgcagggacaaagaaataacacacccggtccgccagccgtgcaatcggagccttggactggctggcctcctccaccaggcggatcatgcgggccagcgtggagtccctgcccacgcgttccgcacgtaccttgagatacccggcccggttgaacgtgccgctgatcacccggtctcccgccgtcttgtccaccggcatgctttcccccgtcaggtccgattcatccagcgcggcctgcccttcttcaatgacgccgtccaccggaatcctctgcccggttttcaccaccaccaggtccccggaatgaagttcatccagcgggacggcgcgctccgcgccgtcatgccaaaccagggcctcctggggaaccagcttcaccagccctttcacggcggcgttcgtcttgcggtaggaacggcgttcaagatatttccccagggaaatcagggtgacgatcatggccgcggattcaaaatacagttccattccgtccacgttggcgccctgccacagcgccgcaatcaacagatacagcccgtacaggaaggcggaaccggagccgatggcgatcagggaatccatattgggagacagcgcggcaagctggcgcacgccgttgattaaataatgccggttcagccacagaatcgcggccgccagaatgcactgcgcccacaaattcatccagagcccccagccccctcccggaacgggccagtgccacatgggccccatggacagatacatcagaggcgccagcagcagaacggaccaaacgagacgggagcctcccgtttcctcctgcccctggctttcctccccatccgcaccggaaaacggttcctcccgccagtccgccaggtggaagccggctttctccactacggacgcaatgcgccccctggcgggcgaatcgggcttttcaaacagaacggtcatccgccccgtcagcaaattcagctctacgcgctccaccccctccaatccctccacggcgcgctccaccttggcagcacaaccggcgcaatgcatgccggaaacaagatagttcttttcttccattgtcgttaaaacggagtgtttgattttccgggaccaaagaaggctcccatgttgttaggtgaaactaatcccatcaatcccgtttctcaagccgctttcgcggcttcacccttttccaataaaaaatgacaaaaaaacgcccgcggccccgtaacagtaacaaacaccttcatcccttcatgatgaccgctcccaccctgttccgagtcctggcctgcacggccctgttgtccgcccccctccatgcccagctttacaccctgcacggggacggcgtcaaaaaaaccgagagggtggtggaaaaagcggattattccgattacgaactcgtctggcacgacgagttcgacaaggacggccgcccggaccccgccaagtggaattacgaacacggattcgtccgcaacaaggaggaacagtggtaccagccggaaaacgcccggtgcgaggacggcatgctgattattgaaggcaaaaaggaaaaacacgccaatccccattatgacccggcgggaaagaattggcagacgacgcgcaaggaagcggattacacctccgcctccctgaccacgcgcggcaagttttcctggctgtacgggcggtttgaaatccgggccagattcagcccgcgggagggcatgtggcccgccttctggaccatgggcgtcaaggaaggatggcccatgtgcggggaaatagacatcatggagtactaccagtccacctacctggccaacctctgctgggcctcccccaaaaaacacgtgggcaaatggagcactacctacacgccgctcaaatggctccaggaaaggcatgcggactgggcggacagcttccatgtcttccgcatggactgggatgaaaaggaagtgcgcctgtatgcggacgacatcctgctgaacaggacgcccctggacaacaccgtcaacgccgtttacaaggaagtcgccaatcccttccgtcagccccatttcatcatcctgaacctggccatgggcgccacaggaggcgatctgaataaactgcccctgccccagaagtatgaaatagattacgtccgcatataccagaagaaggattccccccacaagggcaccattccctaccggacagagaagaaaaaggatgctcccgtggaactgtcccgccttcagaaagcgctagacgaatagggaaacgtgaacggccaggggcgcatggaacggatagagcaaaaagagaattccggcttcgccgtatccgtaaggtccatccagtttctttaaccccttccaattcatataaaagtccctgccttcgggaacgggggcggcctgttactcggcagccttccccttgagcaccaggagaatgtgttccgccatgagggcgtgcccttccgcattggggtgcacgccgtccaccagcagggcgcccttgtccttcatcaccttgttgaggtcgatcaccctggatttggtgctcttggccacctgccggatgagcggaatgatttccttttcaatgcattccctgctgatccccccttccctggcctcctgggaggggatgggcagcaggcagtataccttcaatttgggattctgcttgcggaattccgtaatgatctccttgtaattgtttacaaaatcatccttgtggctccaattcacttttttgctgtcattggtgcccaggcctatcaacagcatgtcaggcttgaacgccagcgcgtcctgataagccttctcccgcgtgatggggcggtcccccttgaacagcaggcagcgcgccgatacgccgaagtttcctacttccgccttcctgtccagggtcttcgcaatccgggatacccagcagtcttcctttttaacccccatcccggcggtgatgctgtcccccagacaggccagcttcactgcggcggcacaatccgccggcagaaaagcggccagcaaccctatccacaacaagacaataaactttttcatggagtaaaatattacaatgagaatggcttactggacgcggcttcaaatgtaaagcccgtactccggcccgtcttctggtctttttccgcgccgtcccctcatgaaaaagccccggccggataaaacccggacgggactcttcaaataacaggaaaagggaacgtttaattcacgcggcccaggtaggagccgtcttccgtctttacggaaatcttttcgccgggcttgatgaaaaggggcacctgcaccaccaggccggtggtcatcgtggcggacttgtaaacgttgttcgcgctgtcgcccttgacgccttccggagcttccgccacttccatggtgatggcggcggggagttccacggaaacaaccgtctcatccgtgaaaagcagaatgtagatgttgccttccatcaggtaatccttgacgggttccacgatgtccggagacacggtaatgtcttcgtacgtatcggggttcatgaagtggtagcccatgccgtcaatgtagctgaactcatattcctcacgggcgaggttcacgccttccagggattcattggaagtcaggcgaaggttatataccttcttggtggaaatgctgcggatgctcatttgcacgtaggaggccatgcggggggggcacttgtgctccatgctgaccacgacgcaaacgtcattgttatgattaaccgcgtgtcccttgcgaagattgattacgggtacttttgccatgcggcccgtaccataccatgttttcccctcccgtcaagccgaaaaaacgcgccaaacccttgatgcgcttggagaaaacgcctttggccgggtgaccggaaaggccggaaaaaccatcgttcctaccggctgagatcctgctggaacaggaccttgatgccgctggaattcagcacggtgcgcccgaagttgaggtcatccacatggagggcgaccagggagccccgcgccatgcagggcatcagggggtacaggaagttgacgttcatttccgcggcatacagcacatccaggcacttcttgaggtccgcggggccatggcggagaaccgccaccagaacctcggactccgtatagcagatgcccttttccagaaagatttccgacgttcgttccggatcgctgacaatcaggcgcgcaatggtcgcctcatggcagtcgtgcatgctgaaccccaggcagaagatgccgtgcatgtccagcaggccgaggagggcggacagcgcccccacccggttctggagcatgatggaatattgccttatcgtactgccgggggctttgatggcttcttccttcatgacaataaagcaaacggggttgagttctatttaacgtatgtcttaagcacgcgcctgatgatggcaagcgcctgctggacttcctcttcactcacgttcagcggaggcagcaggcgaacggtttccggcccggcgggaacggaaagcaggccctcctgccgcagagcctccaccaccacggcggcaaccgtcttgccttccggcgcgtccaccatctccggattgaggccgatgcccagcaacaggcccaggccgcgcacgccctggatcacgggcaggttccaggattctatttccgcgcggatttccgcgcccaggcgccgcgcccgttccgggagcccctgggagacgatttcccgcagcacggccaagccgaccgtggtgccgagcggattgccgccatacgtggagccatgggagccggggtccatgatggaggcaagctccgtgccctggtcgtcaatggcgcggtcggaaatccagaagccgccgatgggaaaaccgccgccaagagccttggcccaggaaacgccgtccggctccacgtccggagccacggcgcgccatcccatgatgtcgccgcaacggccaaagccgcactgcacttcatccatcagcaggagaagatcgtgctccttgcacaattgtgccaggccgcgcaggaattccggagtcacgcagttgacgcctccttccccctggatggtttccagcatgaaggctactgtttccggcctgatggcttcgcgggccgtttccaggtcattgaaaggcagatggcgaaatcccggcagcatggggtcaaagcctatcttgattttatcctgccccgtggcggacatgctgcccagcgttcttccgtggaaggatttgttgaacgtaagcacttcataacggggtttgccgtccgcctggggcttccggtggccgtagcggcgcgccaccttgatcaagccgtcattggattccgcgccgctgttggagaaaaagaccttccccggacgctccacgcatttggtcacgatgaattccgccagatccgcctgctggggaatctggtacaggttggagcagtgcaccagcgtggccgcctgcttttgcagggcctgcgttaccacgggatggcaatgccccagcacgcaggtggcaatgccggcacagaagtccagatagcacttccccgtgctgtcccacagtcgggagccttccccgcggacggcagccatgggataacggccataggaatggagtacgtaccggttgagtttttcttctgtgttcataagctaaggtaatacgcgtgtagtttgcgcttctggccccgtctgtaaatgatttttttgggagccacgtcatgattctcacattttatcccggcgagtagtcatatctctgttcggcggcatttcatttttcttttcttttatccttttgccgccagaataaatctacaaccagcagcaatccatcatggcacattttttcaatcccaaaggttttctggaggaattcaaggcattcgcccttaaaggaaacgtcattgacctggcggtggcggtcgtcatcggcggcgcgttcaacaaaatcgtttccgtcttcgtctccagcatcatcacccccatcatcggctacctcacctccggcgtgaacctggcgtacctgaccctgaaactgggggacgtggaattgaaatacggggaattgcttcaggcgaccatcgacttcatcatcatcgccttctccatcttcgtggccatcaagctcatcggctcactgaggcgcaagagcgaagaaacgcccgcagcccccgcgcccaagccggatgacgtcgttctgctggaacagatccgggacatcctgcaaaaacaggcggacgtcaaataaggccgccaacagcatttgtgccggtttcccgctgaaccggcacatttttcctctttacttgttccgccgcgggcgggaaagtggcagcatgaatttcctcctgcgctcccttgcctgtgccctgctgcttgcgccgtccctgcttccggcggcggagacccagcgcttcgttctggaacgcccctaccaggtggcggaaatcccggagcctgaccggaacctccctgccaccaacgtcatcctgatgattggggacggcatgggcatccatcacctttccgcggcctgggcggccaaccgcgggcgcctgttcattgaaaactgcccggtaacgggcatctccaaaacatggtgcgcggacaagctggtgacggattccgccgccgcaggcaccgccatggcgacgggtaccaagacgctctacaagagggtggccgtgtgccccaggggcaacaagctggactccctggtggacaaggcggcggacatgggcaaatccaccggcgtgatcgccacctgcgagctgaacgacgccaccccggccgccttctgcgccaataatgaaaaaaggtcggattcctacggcatcatcggggattacccccgttcccgcgccgacttcattttcggcggcggcggcaagtatttcacgcaaaggccggacgggagggacattttcaaggagatgcaggcgcagggctaccggatcgcccgcagctgggaggaagccgccgcactgccgcccggaaaaacgctggccgtcaccgctccggggaatcttcccccgccctccaggcggggagacgttctgcgccgggccacgctgaaggcgctggataccctatcccgtaatcccgagggatttttcctgatggtggaaggctccaacatcgacaaggccgcccaccgcaacaacctggaagaaatgatggaggagcttctcgacttcgaccggaccgcgggagccgtgctggactgggcttcaaaacaccccggcaccctggtcgtcatcacggcggaccataacacgggcgcgttcgcactcacaggcggcaaccgggagaaaggggaaataaacgcccagttcggctccggcaatcacgacggcatggccgttccggtgtacgccttcggcgcgggaagcggcgcgttcaccggcatttacgaaaatacggacatcttccacaagatcatgaaggccttcaaaaaagggacggtcaaacccgcacccgggcgttagaacttctgtcaggctccgttccgcccctgctcatccatgtgccgcgccaccagcccggccccggcggtagccaggccgcctatcaggaacaccgcctgcggaccgcccgtattcatccagatcacgccgcccagcacgccgtaagtgatggaagccacatggttgatggccagcccggtgtaaatgctcggcgtgatgtcctccggcttctcgcagatgcgggccacataagtgctgcgggccatgcccagggcgaacagcaggttgtccagcacgaagcaggcggtcaccacgcccacggcccagtgcagggggagcagctccggggcgaaggcatacgccaggcacaggagggacagcgcaatgctgtcgaaaatcgttaccttccgttccccataccgcttgatgctccagccgatgaggggctgcgtggccagcccgatgacgccggcaatgagcagggtttttccgatgtatccgggcggctggcccagcgtgctgaccatcagccagaagccgaaggtcagataaagctgcttgcggatgccgtgcaggatttccagcccgtaataaacggcatacctgtgcttgaagacgaagcactgccgccagccgcgccgctgcggaaagacgggcgttttcacccggctcaggaacaggaacgccagcaggcacacgccgcccgtaacgaaaaagtccacggcaaaagactggttgaatttccacttgatccatacgcacagcgcgcccagcagcgcggccgccgtccccagcgccttcatctggccgagcctcaggctacggttctccggcctcgccgtatggatgacgatggtatcaatcatgcccatcagaatgtgctgccccaggctcaccgtcagaatccacgcagacagcgcccacaggctggttccggcgccgcagaaggccagcgcgtacatgccgccgaacatcagcaggcacgccaccccggccatgcgcacctcattgaacatgaaaagcaggctgaccacaaaaagggacaggatgccgggcagttccctggggagttcaatgaacccgcgcatctccacgtccagatgctgggcgtcacgcaggaagttgctgaaaatgagatcatacacgccgcttccgaactggcccagaaagagagccagcagcacaaaaaccatcgtcttcctgatgcggggggaagcggcttcactcatagggcggggatactctcacaggtgcacaggcggagcaaccgctatttttatccgccggcctttcccggcatttgaaaaaaacaatcgccggaacagaattttttcgggaaataccacgtagttacgctatgatttccagacaccttttccctgccatggctttcagcttatcctccctctgctggggcgccccgtccgctccggttcccgggacgccccacatcattccccagcccgccgccatgcgcgttaaaaccggagaagccggattttccctgaaagacggcgtccggctcccggaaggaaatcccctttccaaacaggcggaacggattttccgcgacaacgggatcaaaacggcgctggttgaaaccggagcggacctcatctttacggaagacgcgtccctgggcagggaaggctaccgccttgccgtaacgccggattccatttccattgcctccggttccgtgaacggcgctttgtacgcccttcaatcccttgtgcaaagcgtcgcttccgacgtgaacggagctccggccctgccccggctggacgtgaaggaccagccccgtttttcatggcgcggcctgatgatggacagttgccgccacatgatgcccgtgcgggacgtcaaaaagatcctggacctgatggagaggtacaaattcaacaccctgcactggcacctgacggacgaccaggggtggaggctccccatcgccaagtaccccaggctgacggctgtgggaggtacccgggcgcagtcccccgtcatcggcagccgcaacaaggcggacggcaccccgtactccggccattacactgcggatgaaatccgggaagtggtccagtacgccaaagaccgcggcattaccgtcattccggaggtggaactgccgggccacgcctccgccgccatcgccgcgtatccggaactgggcaacacggacattccgggctttgcgcccaaggtgcaggaaacctggggcgtgcttccctacaccttcgcccccacggaaaaaaccttccgttttctggaagacgttattgatgaagtgtgcgccctgttcccggacagcccctatatccacatcggcggggatgaggctcccaaggaccagtggaagcagtccgccgcggcgcagcaggtcatgaaggacaacggcctcgccaacgagaacgaactccagagctactttatccggcgcgtggaaaaaatgatcaacagccacggcaagaggctcatcggctgggatgaaatccaggaaggaggcctctcccccaccgccaccatgatggtctggcggagctggatgccgaacagcgcgcggcatgccctggaacagggcaacgacgtggtgatgacgcccaacagccacctgtacttcgactatgaccagggccccggcaaaccctccgccccggagtatgaaaccatcaacgacgacaacctgacctggcagcgcgtctatgggctggagcccgtcccgcagggaacgccccgggaacaggaaaaacaggtgctgggctgccaggcgaacatctggacggagtacatccccaacctgccgaaatgggaataccatgcctttccccgcgccctggcgctggcggaagtagcctggacccccaaggagctgaaaaacgagaaagacttccgcaaacgcctcgaccgccagcttcccttcctggacgcccatggcgtcaactacaagaggccggacaacggggcccccgcgcagccggacgccgtcattacccgggaacgccggtaaatacggagggaaggcccccgcgcagcctccttccggaggccgcattatgggctagccaaccttcacgaaaaccattacattggcggcattatgaatttggaactgcttcgtcaggtttgcgtgactccgggcgctccggggtttgaagacaaaatccgtgatttcatcattcaggaagtggcccctctggtggacgccgtgcgggtggacaacctgggcagcgtgattgccatcgtggaaggcaaggatacggaaaaaaccatgatggccgccgcccacatggacgaaatcggcttcatggtccgtcacattgacgacaaagggttcatcaaattcctccccctgggcggctttgacgccaagacgctgacggcccagcgcgtcatcgtccacggcaaaaaagacctcatcggcgtcatgggcgtgaagcccatccacgtgatgtccccggcggaacgcgccaagctgccggaagtgaccgatttcttcatcgacctgggcatgagcaaggaggaagtggaaaaatacgtctccgtgggcgactccgtcacccgtgaacgcgacttggtggaaatgggggactgcgtgaacgtgaagtccctggacaaccgcgccggatgctacgtgctgattgaagccctccgcgccatcaaggcttccaaaaagaagccctcctgcaacttcgtggccgccttcaccgttcaggaggaagtggggctgaggggcgcgcaggccggcacgctggacatccagccggacttctccatcgccctggacgtcaccatcgcctgcgacattcccggcaccccggcgcacgaccaggtctcccacctgggcgcaggtgccgccatcaagctgtatgacggctccgtcattgcggaccgccgcatggtgaagttcatgaaggccatggcggacgcccacaagatcaaatggcaggtggaaatgctgccggcaggcggcacggacgccggagccatgcagaagtttgttccgggcggctccattgccggggccatctccgttcccacccgcaacgttcaccaggtcattgaaatggcgcacaaggatgacctggacgcttccgtagcgctcctgaccgcctgcgccatgaacgtggacaaatgggactggtcctggaactccgtcaacgaatgcccggcagaaaaacccgccaaggcatccaaaacggcagccaagccggccaaagccgccgccaggaagaaaaaggccaaataaaagccccggcgccaaccgatcactcacccgcaggccgccccggaaacggaggcggcctgcctgtttccggacgtcttcaagcgttccgcgcaatacgcccgcggcgttgctccgtcccgtcaagaagtgccgcagccccttgcgccagtcaaacctgaaattgagcggcagtgaactctgttccctgaagcagggcatcctgtcggacgcatgcgtttcagctgccgcagaggcctgaggcacgccacggaggcttttcaggacggcctccccataaaaaatcctccggcacccagagatgccggaggaggatcaatcctgaaaaagaaagttacttggcggcgggagcgggagcttccttcgaagcgggagcgggggccggaacggcttccacttccacttcttcctccacttcaacgccttcttcgggaccggaagctccggtctgcttcatggcgtccttcagggcctggcttccgaagaagtcggcctgctgcaagcgctgcatgtcggtcatcatgcccatgaaaatgggcaggagttcggcctggcgcgcctgcatggcggcatccatttcagcctggaccttctgggcgctcttggaaagggcttcgcccttttcattgatcttcgccatcttttcagcagccgcgtctgcggtggccttgtccttcaccgtgctgagcgtggcggacatttccttcatcaaagccagcatctggtcagcggcttccttcgcttccttggaaacttcagcggccggcgcggtgggcgcggcaggggtttcagcggccggggcgggtgccggagccggggcatcctgggcggaagccatacctgcaaatgccagggcacatgccgaactaattgttacaatgctcttcataacgtttccgttgtacaggctcgccatgcatgcgtcaatgaatcattgtgtaacggctccccgtgatgccgcagaaaggggaatttgcgttttttcttcccttggaggattttttcagttgcatctttttagaattattataaattcattcccgatgactaaaaccatagaaaacctgaaagccgccattacgggcgaaagcaccgcctccgccacttacgcagcctatgccgccaaagccgcccaggaagggcagcccctcattcagaaattgtttgaagccgcctccaaggcggaatccgtccacgccgccaaccacaacaaggttctggaaaagctgggcgcaacgatggaccccatcgatatccagattcatgtaggaaccaccgcggaaaacctgaaagccgccatcgccggggaaacccacgaattcgaaagcatgtatccggaattcatcgccgtggcggaagaggaaggccagaaggccgccgtccgctccttcacgtgggccacggaagcggaaaaggaacacgccgatttttatgccgccgccctcaaggccctggaaagcggagacaccagcgccctgcccaggcaatactgggtatgcctggtgtgcggggacaccttcaaatctctggaaggcgtggacgcctgccccctctgcggcaccaaggctgaaaaattcctcgtcatcgggtaaactccgtctgagcaccggaggccatccatggcacacaaaacccgcccggaacattccgggcgggtttttacaggccggaaaccgctgccatctggggaagcggccagagaagaagcatcgccgggttttcccttccggtcattccgcaagcgccgttccagaaccgtgttccggcccttttccggacttcaagacttttctccacttccgactgtccgggtggccctggtcctctcctcccacgtgcatccggccccggaccttttttgaatgcccggattgatggacttgttcatttaaaacattaaatacatgcattccgttccggctacggcgcaggcgagcatcccgattaaaatcatgatgatgccgaatgcgacggattttctgcacaaggcgacaacggcgcaggcaacggaagccacccccagcaaaatcccggctgcgcccagcacggttccgggaacaagccccaggccggaagccgctgcgacccagggcaatgacacggcccccacgacacaaatacaggcggctcctttcacagcttggggacattgcagcacaacgggctgattttccataagcttccctataccctcccaaaaccgggcctgtcaactacaaccggaaattcccctctttccgttaaccccacatgccggacgggatgcccccacagccaattgcctgcgccgccatccgcaccaagccccaagcgcaaaaaacggcatatgctatcagcacagccgtttcaacggcggttcccttttcctgcccgggcccttccatgaaaaggcgttccgccacattctgcttgagcatcaccgtgaaacccttacaatggctcaccccttcaagcaggaagaatactttatcctttctttgcgatgacctctccccatgcatccacccgttccgcagaacggtacgcgggccggccaggcgctctttccgccgtcttccaggctcttcgcgccgcgttctttccgcgccgcatgcgctgcctgtgggcagccggactcgcggcggctctggtggtcaatccttatgtgctcaatgacggccagagcgtgctgatgagctgcatgggcatcgcctgttccgcctccctgctctgcggcaccatccttctctgcctgaaataccgctttaccgcctacgtcgtccttccggccatcatcctgttcaacgcgggcctgtacatgatgcagatgcggtacgggctgacgctgaacctctccgtcctttccagcatggcggagaccaacttccgggaagcctgcgccttctgcaccgccgcctccgccaccggggccctgctgctggcggccttcatttacctggccatttactggagccgccgttccctgcgccagaaggccacgtggggcgcgctggcgtgcatctggagcctgtacggaatctttctgctgctgggcattccggccacctcctacagctcggaacccctttacctttactacacctctgacaaggccaagggctggcccctcgtggacttcgtgatggcgtacaagctggcggacgaatacgtcacccaggacgcaagccgtttcaatgaactccggaacctgccgtcctgcgcggaacccctctccggatgcgatgctccggacgacctggccgtggtcttccacatgggcgagagcgtgcgcgcggaccacctttccctcaacggctaccaccggaacacgatgcccctgctttcccgggaacccaacgtcgtttccttcccccacgccacctccttcggcatcgtgaccaggatttccgccatcggcatgtttacggatgcggaactgtcccgccgccgtcccgcccattcctccttcattgacctgttcaacaagcacggtttccgcaccgtccggatcatggacctgtgcggagactccatccatgactattccctgggcatcctgacccggaactgccgggaacggaagcagacgccgcccatgcacgaaacgcccggaatgatgcaggaacgcacctccctggtcatggaggaatccctgaaacggcacggccgggaaaaacagctttacgtcatttacaacaacggcagccacatggcgttcagctaccccgcacaggcggaacgctttaccccggcgtcctgcaacatggacgaccccaaggcccgtctggaagaaaccgtcaatgcgtatgacaattccatcgtggacctggacgcctccgtccaccgcatgattgcactgttgaaggacaggccggccatttatttttactgctccgaccatggcgtggcgctgggcgaggaaggaaaaatgttccaggggcatgttctgccgcctgtttaccgtcccgcgatgttcgtgtggtattcggacgccttcgcctcacgctacccggacatggtgcgcgcgctgaaggccaaccgcctgaaagccgtttcccacgaccacattttccacaccctcctttccctggcctccatccggtcggaagtcgtccggaacggcctgaatctggcctctccggacgcccgggaaaccccggcccccctccagccggaagtgctggcggaatggctggccgctcccgcaccgccgcagccgcttccgtaaaaaagatggaagctgccgtcatcctctgcgggaaacggctggataggacgaactctaccgtacccggacttgcagtggatgcctgacgcactcccggacgcggcgcgcctccgcctcccaggcggcagaggatttgaacggagaagccttgtcccaaaccgcccccatgtaccactcaaagggctttccgttcgccgcctccctgatccagtaggtacagccttccgagtccactgccccgccttccggaccccagggaactatcacggcggttcccaggcatccgtcattcttccggggcctgctccatgccgtcatcaagccgccgtcctcccggtccttcgtgaccgtttcataatcattcctgccctttccggtatccattcccacgccggccttcaccgtttccgccccccggatggtcaaggtgctgcggactttggaaaaacggcttcctgcgtccagagccaccctccgcgtctccgccacgcgtacgccgccgcccacgtcccacggcgcataacccacttcaaaggcggtctggaccggaccgttgtacaatgtccgcgcgctggcccagtttccggatacatgcggtttcccatccctgaacacggcaatgccgccgcagccccgtcccggccctacgttgtacatgtccagtcccctgccatgatcccggtggtaatccccccgcttgtagaagtcattgatgacgggagcacccgcgcgcttgctccatacatccgttccgctggaaaccaggccctccccctcaggggccggcctggcaacggccggaccgtaaatccggtgcgccgtaagatcgttctcccacgcgaaatcatccaggcgttccgggaccaggcggctgaaacagacgtccgcggaaggagccgccttcagggaggaatcgttcagaatccagaaatcacgggccgttccgggccggaaattgctctggaacaaaagagtatccgtccttccatctccatccgtatccgccagttggtgcgggatgacgcgcccgtggcggacgtcaaacacgcgaagggcggcggcattcccggaagttccggacgtccagggcaccgacacggtttcagcaggacggaacttggccagtgggttcgtgacggttacagtctttctctgcggatggtcccggccaatgacgtatttgcgcagttcggtgccggccatcaggtaggcgcccgcgccgtatgcttccgtatcctccccggaataatggcccggcttgtcggcaatgggctgcacccagcccagcgcgccttccgcgttgacggaatcacaggcggccttccacgccctgcggatgacgggaagatattcatccgcatccagatacccctggttcaccccccacagcatcccgtacatgataaagagggtgccgctcatctccttcaaggggggttcttccgggtccagcaggctggcgtgccaggaaccgtcgggcgactggcattttttcagggatgccgccatacgcttgagcagatcctcataaaaggggcgggaaggccagtccgcgggcatgtcctgaagaataagcggcagtccggcaatcacccagccgttgccccggctccagaacatctttttcccattagccgccggaatggtgaagtaacgggaatcacggaaaaacagcccttccttccggtcaaaaagatagccgtaggtgagcttgtattccctgtccatgaatcccagataccggcggtctccggtataggccgccagcttcacgaacacgggaggtgacatgaacagggcgtccgaccagctccagcggtcctggcagccgggagtcccgaactggagggaagcggaggagggccggttcatcaccccgtccagcacggcgcgtattttctccgccgcggcggtatttccgtcttccatcgccatctccatccaggcgtggcccacggcgtgatcgtccgcatggtaatgccgtttcagggttctccattcctgttcccctcctgttttcctcagcagcggcaatcccggcccttccgggacggccaggccatactgcaccaggccggaataaaaggcgccgtaggtccagtgcagcggcgagcgttttctgggatgctccgcctgccatttcgccaccagtcggagattatcccggatggtcttttcattccagtccgcgggagcgccggaagcggggctccccgcagaaagcgcgggaagaaccagcagaaggaaggatttacgccatccgttttttgaaaaggaaaagaaattcatttgactggtacggaaaaagccgcgctgaaatttctccgtgaggaatgaatcttcccttttcggcctgtcccgttttcccccggttcccggaaaggggaggcaagggcacatatggtgccatgacggaagggaatgccgcgttatcaaccattccccgcagcatatatacaacatattgtatcattataaatatttaatacattatttatacattttccttgcgggggttctctttctgtggttcattgcgtttcagcgcaggtaacggaagacggtgaaaatccgtcgcggacgcgccgctgtaaccggtagacgatggaccggacactgactgccagcagtcgggaagtccccatcacatgtcgcaccggaagccagaagacgacctgatgcccccgtatcccatcccgcggacaggatgaacatacgcacaggtcctcatcgtgccccttgttacaaatgcacgcatgcggcggcccctgcctatgatttttccaggcttttgcccaggctcgcggatgagcggtcatcatcccttccaagcgagacacccactatggcaacaagcatcatcaagcgttccggaaaaaaggaacaataccagggctacaaaattgaggaagccgtcaagaacgcgttccacagctccggcaccgcctacaaccgctccatttacgaagaagtggaagccaagctgagccatcaggactgcgcgcatgtggaagaaatccaggacatgatagaacgcgccctgttccgctgcggatactttgacacggccaagaccttcatcacctaccgcttcctgcacaaaatgcagcgcgaacagctcgggggcctctattccggcaatacgtacgtggactgcaagcagacggtggaggaatacatcggccagagcgactggcgcatcgccgccaactccaacaccacgtattccaacgccggcctcatcaacaacacggcaggcaaggtgattgccaactactggctggaccaggtttattccgcacgggagggggccgcccaccgggaaggggactaccacatccatgacctggactgcctgaccgggtactgcgccgggtggagcctccgcaacctgctcaacgaaggattcaacggcgtgcgcagccgcgtgaacagcaggccgccgcgccacttccgggaagcactgggccagatggccaacttcctgggcattctgcaaagcgaatgggccggagcccaggccttcagctcctttgacaccttcctggcgccttacgcctttaaggaccaggcggatttcacgcgcatcaagaaggacatccgcagcttcgtctacaacctgaacgtgccctcccgctgggggcagtcccccttcaccaacgtcacgatcgactggaccgtgccgcgggacctgcgggaccaggcccccttcagcggcggggagcacctctttgaaggggtggaggacccgggcctgctctccctggcgcgggaacgcggcgtgaacaagctgacagagctgacctacaagcatttccagaaggaaatgaacctgatcaacaaggccttttacgaggtgctcacggaaggggacagcaccgggcagcccttcaccttccccatccccaccgtcaacatcacggaagactttgactgggaaggggaaaacgtgccgctcctgtttgaaaacgccgccaagataggctcctcctacttccagaacttcatcggcagccagtacaccgtgaatgaaaacggggaacgcgtgccggacgaacgggcctacaagccggacgccgtgcgctccatgtgctgccgcctccagctggacctgcgggagctgctcaagcgcggcggcggcctcttcggctccgcggaaatgaccggctccatcggcgtggtgaccatcaacctggcccggctgggctacctgttcaagcagaaccgggaagccctgttcgcccggctgggggaactgctggacctggccaaatcctgcctggaaaagaaaagggccttcgtccaggaaatgtacgaccgcggcctgtacccctacaccaggcgctacctgcccaccttccgcaaccacttctccaccatcggggtcaacggcatgaacgaactgctgcgcaacttctccaacgactcgatggacatcacctccgaggaaggcaggacctttgctgaagaaatcctggaattcatccgcgtgcgcatgcaggagtaccaggaggaaaccggcaacctgtacaacctggaagccacgcccgcggagggcactacgcaccgcttcgcccgcgaggaccagaaacgctatccggaaatcctccaggccggccccgtggggcagcgttactacacgaacagctcccagctccccgtggaccacacgagcgacctgttccgtgcgctccagctccaggacgaactccagtgctgctacacgggtggaaccgtcttccacatgtacatgaatgaagccatcagctccccggaagcctgccgggacatcgtccgcaaggtgctaacccgtttccgcatgccgtatctgacggtcaccccgctcttctccgtctgcgacaagcacggctacctgcgcggggagcatgaatactgccccttctgtgatgaagagctgctccacatccacaggcacgaataaccctcttcaaccaaccgcctcgtttcaaaacccaaccatcagcacgacaatgaccaaacaggaaatattaagcaaatacgcacaggaccgtacccgctgcaccgtttatacgcgcgtcatgggctaccaccgccctgtggaaaccttcaacgccggcaaacagggcgaattccacgaccgcgtccacttcgtggaaccgggccgtccctgctcctgctccgcccaaacggaacagccgcggtaattttcccaataacatatgcgaagtcaatgggaacgggccggggcatagcggacatcacgccgctcaccttgctggattttccaaacaaggtggcctgcatcttctggctgagaggctgtaacttgttttgtcagtactgttacaacgtctccctggtcagaggaacgggctctcctgccggagaccggacggactaccttgatttcctcagagatcgggtgggatttctggacggggtagtcctgtccggcggcgagtgcacgctgtgtcccgaccttatccccatctgccgcgagatacggcagctaggcttcgcgattaaaatagacaccaacggcacgaggcccggcgtggtgaaagcgctggtggaagaggggctttgcgactacatcgccctggactacaaggcgccccccgaacaatacggcgccgtcaccggcaggcccgaccttttcccctccttttccgcaactctggactacctgatcgcctcccaaaccgcctttgaagtcagaaccaccgtccatcccgatttattgacggaagatcacgtcaacaacatcatacgcgacttgacaaagcgcgggtatgggggcaactacttcgtgcaaaatttctacctgaccaaacaaacactcaactctctccccgcgccgagccggttgtttgaccggaccaggctggagccggcctccatccccgtccgtttccgcaacttcgagttcgctccgggcaaagactgacccagccgaccatgttcgacatcctgctcaatcacaacaccctggttctctttggaatcatcttcttcggcatcgccctcggcagcattaaaatatacggcctgaacctcggcctctccggcgttctcttcgtagcgctggccgccggccactaccgcctggccatccccaacggcgtgggccagctgggcctggcgctctttgtgtactgcgtgggcctcagcgcgggcaaccgcttcttctccgccatcgccaagcagggaagcaagctcgcggtcatgtccgccgtgattgtaggcgtttcagccctcttcacctgcctcttcggcatctggttcaatgtccccgcaggaatctcctccggcatcttcgccggcgcgtgcaccagcaccccggccctggcggcagccacggaaagcctgccgggagcctccggcagcggcgtcagcatcggctacggcattgcctacccgttcggcgtggtgggcgtggtcctcttcgtccagcttctgccgcgcctgctgcactttgacctgaacaaggaggccaaagccatgcactccaggcaggaggccagcatcatttcccgccttgtccgcgtcacgcagcccaacctggtcggccagaacattgcggactgcaagctgctggacggcctgcactgcatggtcacccgcgtggtgcgcaatgacaggctcatgcccctgacgccggaagacacgttccgggagggaacggaagtcctcatcgtgggcaacagcgacacgatgccgcacgacatcgccttcctgggggaaatatgcgacaacccctaccccatggactcccagaaggagcgccgcaagctgatcctgacgaacaagagctacgccgggcgtaagctccgcgaactgaaaaccctgcgaacggacggcgtgatcatctcccgcatctcccgcctgggcttcaccttcgtccccacgggggacaccacgctggaacgaaacgacgtgctgaccgtggtgggttccccggaaaacctcaccaaatacggggacaaaatcggccaccgcagccaggacatgaaccagacggaccttctttccctcgggttcggcctctcgctcggcatcattctggggctggtcaacttcagcctgggcaacggcctgggcatctccctggggattgccggcggccccctcatcgtggccctgctgctcggccacttcggccgcctgggccccatcgtgggatacatcccgcgccccacccgccttcttttgcaggacctgggcttggtcttcttcctggctgacgccggaatcaagggcggcgcggacctggtcaccaccgtggcgacgcatggcgcggccgtcttcatcatgggcgtcatcgtcacctgctccggcatgttcgccgggtacttcgtgggcatgaaggtcttcaagatgaacatcctggaatgcctgggcggcatctgcggcggcatgacctccaccccggccctgggcgccatcgccagcaagacggactcccaggcccccgtggtcagctacgccaccgcctaccccgtggccctcatcctgatgaccatcattgcgaaggtcatcatccagaccatcggcggcgtggtgggcgtttagcccaaggcgcaaacttcaccacccggaaagaccgcgtctccggcggttctctccgggcgccatgcttcacggaaaaaggaatatcgattgcggatcagcgccgtttacctccttgccaccagccggaagtttaagaccccgtttccgtcacttccatgcagacggactggaaggcatttttccagttgatgcggattccgaagtccatcaggtaatcaccaccaagcacccgttcatggacgttggccagggggccgttttcatccaggttgatctccctgaccaggtatctggcggcaggattcaagcctttcaggcgcaggggcggcggggaatccgccagccatttgtccattagccaggcgaagacgacggcccgtttctcatgaacgtacatcagggcggccacccggctttcatacggggaggacaggcggtacaggtccccgaactggaccacggggcggatgcgcttgtattccgccagcgcccgtttggaaaattctacttcctccttcgtcatgtcacagggctgaagctcgaatcccagacggcccgacatggcgacgtcaaaacgggatttgagcggcgtgacgcgcttcgtctgatggttgggggaggccgtcacatgggcggccatggtgatggccgggaacaaatggcctatgccccactgcatgaacacgcgttcacaggcgtccgtattgtcggacgtccagaattcatgatgcctccgcatggtcccgtagtcggcgcggcctccgccggaggagcaggcttggaacgtcacgcccgggaattcagccgccagcgcatcaagaatggcttcatagccgcgcacgtagtcaatggacaggttcccctgatggctggcgtccagccagggggagccgggatcggaaatcttgcggttgcagtcccatttcacgtaggaaatgcccggatgttctcccaacagtttccgcatgacttcaagaatgtatgcgcgcacgtccggattgctcaagtccagcaggtactggctgcgttccagcctgttttcccggtgcgggaggccgatgacccattccggatgcttctgataaagttccgagcaggggttcaccatttccggctccacccagatgccgaagcgtatccccagcttttccgcctggcggattaggccttccagcccatggggcagtttagcacggtttacctgccagtcccccagaccggcccgggcgtcattgcgcgggaattgtccgccaaaccagccgtcatccagcacgaaaagctctattcccaagtccgccgcacgtttcatcatgccgtgcagcactttttccgtgaaggtaaagtacactccctcccatgagttcagcaaggtcagccgctccgtgccgccgccgcgcaggccgtagcggcgcgcccagcggtggatgcgccgggaggcttcccccttgccgtttccactgtgcgccagaatgaggggaggcgtttcaaacactccgccgccgtccagcagatagggagcgggggccacgtccagccccgctcccgcaaagaggtagtgatacgggctgtggcggaaccatatccggtagttgccgggccacgccagcgctcccagcaccacttccccggagtcctcccgcgccggaccatccagggagatgacgaagccggggcttccctcctgggcggcgcgggttccggtgccggaaaccagggcaagttcatgcccccgcgccacttcctcctcgctcatcagggattccccgccccatgtgccgcggaagctggtgacaaagtaacgttccgctcgcaaattcagttgcgcggacgccgcgcggtgcaggcggatgccttccctcccctcgttccgtatcaccgcccattgaaggaaggcgtccgattcccggtgggagcgaacatgaatttccacccgcacggggtaggaagggtctttcccatagaagacggcttcttcccggtcgtcatccagttccagcacttcccatccctggcattccaggcgcagggaaagagttccgtccgcctgggtcgcgcaaatgcagtattcatccgacgcattgggaagccccgtcacggagtccgccagggcggaatacagaagaggcgcatccgcggcgctttccagggcatcctccggttcacgcagccgcggtccgtaataggcgcggcgcacgcggccctgttcatccctgaacagggtcatctgggaggaacgggtcagcaaatgaacggaatccggagtcatggtcggcaaatggggaaagggtaggtcattttttccgggcaggcgcacggccgcccctgccttgtccattaatccctgccccggacagggaagtcaatggcaaaatggcaggagagcccgggcgtttctcctactttttccacaaacgggaggaaggccggaatttcatggtgcttgattcatgcacaaacagtttgctgccgttttccggatggcgtaccacgcgggcacgccgccgcttgatgctgaacgaaccaaagccgcggaatttgaccagtgagcgcctcaggaccgaccgggcaatcgtgtccagaaccgcgtccagcgcacgttccgcctgcctgggggtaacgccgtcccccagctcccgctgaagttccctgacgaattgtgttttattcataggccgcccagcatgatatgccccgttctcccggtaaagcggagaaggggcgcaggcattcctgccaccagccccatacggggatgcccttccgttccgggctgcaagtttcatccttgcccccctccggcggacccattaaggttcagggaagatgccttcccccgccgccggtgctccattcccggaacaagctttcaacgtgaccgcgttgaaatggaatacctgcgcctggcttctgctgcccgtcctggtgttcatggcctggtggatgcactggtatgtctctatccccctcgcggccctgatggccgcgggactggctcccggaaggcgcaaggaactaccggaaagggaatccctcccctcttttcccctgttcaaccggtcctcgtttcttgtcctgggcgcattcatcgccttgatggtcctgtccggatggggggaatgggtcaatcagcacccggaccacatcgtcaggaacgcctgccttcgtgaattggtcgccagcccgtggcccgtcgtttttccggacggagacgtcttgatctacaacacagggttctggctggttccggccctggcaggcaaagtggctgggctgggagttgcccgggcatttgtcgtgctatggggtgcatggggcctgtttcttgcctggctgtggctctgcgttttctccggccgccgttccctgctgctcgccctgctgatggtgatgttcggctcccttctgaatttccaatgctggctggggctggatctgttccgcctgcattacttcggcacggcggaacaggtcatgtgcagcgcaaacgcctccatccctgtcatgctttttttcatcttcctggcttcgggacgcatgcccccgcactggatgccccttttattcgcggccacggccttttattctcccctcgcggccctgggggggctgcccctggcggtctgccagtggctccggcaatggaaaggcagccgctccccccggcgcagcctgcttcatccctcctttccggcagccgtcatgctgggggcgtgcttccttctttattatgcggcggtaaacgcgccgtcctcccatatgggctggcggcctttttatacgcggccgggggattttctgctggcagggacctccttcctgctgtacgccctgttctgctggcgggatttccggcggaattccctctttatctgtacgctggcaaccggactgctgctgcccttcttttacgtcaacggagacgtcaacgacctgctctgcaaggggagcgttccggcgatggcctgcctgctcgcctttctggcctccacctgggcgcggcatccccgtctccggatatggatatggcttctgctggcgctcggattggcgccccggttcaatgttccctattactgctgttcttccagcgccctccaggcatttctgacgccttgcgcctcatgcacggagccttcctcctttccctgccgggaatggcggcaactcacctatgcgccgcaggcacgccaccaggatgaatggggccgcaccatgcaccatcccggacaccggtggcatccctattattccggcacgccgcgcccatggctacgcttcatttaccgtttttgacgtaaagaaaacagttgcgggaaaaacgcccgggaaatgaacattccggattcactcctttcttcatgggaggggtccgaatgctcaggcggtcttttgaccttccttctggaagtttttccagcattcctcgataaccgcgggcagggacttgccttccttgtccatatccccctggcttaccattttcttaatcatttttccggaaacggggtccaggatgatgacggcgggaggcccgaaaacgacatagggggccttggagcctatgcatcctactactttgcccgcttcctccggaacgaactggaaggtaaaggaacccggtgtccttcccggggcctgcctggtatccaccatccagaagatgaattttttgccggaggccctcttgaaagtccgctccttgatatgcttgtccgtaaaaatgttgcaatacacgcaccaggaagaccccgtcaggtagatgaccaggggaaccttcttggcgatggcctcattgcgcagcttgtcaaaggcgggactgcccgattcattcacggctggaacgggagcctgctgcgccagggcggaagcgggagccagcatgcctgccacggcggcggcgcaaagcacggaaacggcaaacttgatcatattacagtaaccataagtctccctgcgcagaagtcaaacttcaagattccgccattgccatcatttgccgttcaaggtatatacattcgccatgcgccattccaacccctataaccgcaggcacccctcacggaataaatggcgctttgttttctggctgttcatggcgttcctgctcctgggcgcagccctggtttatttccaccccgcggaagactggaaaactgcggaccgcagcagcagcggcctggcccctctacccgctgaagaaccggaagccgtcgtccaggtttattcggcacgcgccttcggctggcgcaggtatttcgccgtgcacacctggatagccgtgaaggagaagaatgccggcttttacaccgtgtaccaggtcatgggctaccagcttccctcccggggaaccagcgtttccatcacgcgggacattccggaccgcaaatggttcggcgcggaaccggaattgattcaggaattgcgcggagcagcggcggaaaaggccattcccgtcatcagccgcacggcgcaggattacccctatgccgatacctactggatcattcccggccccaacagcaacacgttcaccgccgcgctgatgagggaagtgccggatctgacggtggagcttccgcctcatgcggtggggaaggattatctgcccggcggcattgccggacggacggaaagcggcacgggcatccgcatcaatttatggggtctcgccgggttcagcctggggctggcggaaggggcggaagtcagcctgctgggcctgaacgcaggctttgacctgttgcgccccgcccttaaacttccgatgatcgggcgcatagggctgccggacgctcctgtgggctgggactggtggagcgtcacgctgcttctttccgccggagggttcattttcttccgcatgctccgccacatgcgcaggaagcggaggcaggcgcaccgcatcccccacttccgccatccgcggacaaaaacgagcgagcgcatttgagccgcatggtacggaagcctttttcccttattccgttccccgtacacgggaagaaggggaataaagcggaaattcgattgccaagcgcggatgaagctgtaagaatccgcgccatgaaaaagctcctgatccgctcctgtctgattgccgggctggcctggaccgcttcctgctcctccaacaaggaaacggcgcctcaggaacccgctcccgccccagccgttcagccggaacaaaccaccgcagcggaccgccccgccccctgggccccggccccggtgaaaccggccattcttccggaggatgagaacgaggagtccgtgccggggccagccgtattgcctggcgacttccgccccgggctgcgcaccccccggctgccggaaaccctgctgtatgatctggacggcaaactgatcaccccctccgcgccgtaacccttttcttttccttcaccatgactgctaccattcccaagggcttccacccggaacctttttcctaccaccaggagcttgaactggacattgacgccctttccaatgcgggcgacggcatcggtcgcgtggacggctgggtggttttcgtccccttcgccctgccgggagaccgcgtgaaggcccgcgtgtggcgcaacgacaagaattattcctccgcggacctggtggaagtgcttcaccccagcccggaccgcgtggagcccggctgccgcctgttcggcacctgcggcggctgccagtaccagcatttttcctacgaccgccagcttctctggaaaacccggcaggtggcggacctgctccgcttgcaggcagggctggaactgcccgtcaatccggccattgcctccccccgccaatacaactaccgttccaagattacgccccattttgacaagcccagggaaggaggcaagccggccatcggcttcctgaaggcaggctccagaagggaagtggtggacgtgccgcagtgcccgattgccatggagtgcatcaacgaggccctgcctctggcccgcaagagcgtttaccaggcagcggcccgtttcaagcggggcgccaccatcctgctccgcgcctcggaagggaccgtcatcaccaataacaacgccgtggcctgcgagcgcgtgggcggtctggaattccacttcctggcgggagactttttccagaacaatcctttcattcttccgctgtttacggattacgtggcccagcaggcgagcatggacggggaggagttcctggtggacgcctattgcggttccggcctgtttgccttgagcctggcgaataagttcaggaaggtgctgggcgtggaggtcagcgagacttccgcggactgggcgcgcagcaatgcccgcagcaacgggattgaacatgcggaattcctagcggcggacgccggagccattttcgcccaggtggatttccccgcggaaaaaaccgccgtggtaatcgacccgccccgcaagggatgcagcatggagttcctgacccagttgttcgccttcggccccggaaaagtggtgtacgtttcctgcaatcccgctacgcagataagggacctggcggagtttgacaaggccgggtacgccgtcaccgccgtccagccctttgacctgtttccccagaccaagcacctggaatgtgtcgcaacaatcactaaaaaattataataaggataaatatgagaacatctgttttcttaagttaccctcaaccctatttaaaaaggcaaaaagattttgtttgtttaatcattgactatttaagagacagaggttttgaaccaagaactctaggagttacagattatgatataaacgaacctttggcggctataagaaggcttatgttagaatctaatggtttaattactattgcctttcggagaaacctgataaagtgtggaataagtaaacctgatagtgatattggacagtcttcttatgaatttacaaagacttggttaactagtccttattgccagattgagcctgccatggcatttcaactgggtttacctattttgatattaagagaaaaaggagtgattgcagaaggtatactggaaaagggagttacaggaacatatttgccggaattcaatttagaaaattctgtacctggatatttaaacagtgaagaatggaggcaacttattggaaaatgggaaggatatgtaagaaatgtttctgaaaataagggaagacctcctaatttatattaaaatatataattccgaccaaataccatattcgtgccattatctctgtccagactaccctttctcgaattataaatccattttctgcacatttgaaatatggtaactcgtgaccctgaaaaagaacatctgattttccctatgcccaagctttacatcaaaacctacgggtgccagatgaacgagcgggactccgagcaggtggcccgcatgttcgtgcagaaaggctataccatgacggaccgcgaggatgaggcggacgtgatcctgttcaattcctgttccatccgggaacaggcggaacagaaggcactggggaagatgggccttctggccaagcagcagcggcaccgtccgcacgtggtgtacggcatgatgggctgcatggcccagagcaggaaggatgaattattcaaggaactgccgcgcctggacctagtgataggcacccagaagtaccaccgcgtgtttgagcatgtggacggcattctgcgcgcgcgccaggaacgccgcatggatgaattgcagaccgtcttttccggcactcacgtgtgcgacgtggcggaagaggaggattcccagaaccgcatccgggaccacctgaatcccggcgcgcgctccacggcgtatgtctccatcatgcaggggtgtgaaatgaagtgtgcctactgcatcgtcccctacacccggggcacggaacgcagccgccccatccgggacgtggtggacgaggtgaagatgctggtggacgccggcgtgaaggaagtcaccctgctgggccagatcgtcaaccggtacggcaggcagatggaaacggcggacggcaagggcggctttgtccaattgctggaagccgtgcatgaggtggaaggcctccggcgcatccgcttcgtttccccccatcccatcggcttccggcaggatctggtgcaggcattcacctacctgcccaagctgtgcagccacatccatttcccgatgcagagcggcagtgaccgcatcctgaaaatgatgcgcaggccgtacaggaatgaaacctacctggacctttgcgcccggatgaagcaggcgcgcccggatttgtccatcaccacggacatcatcgtaggcttccccggagaaacggaggaagactacctgctgacccggcaggccgtggaacgggtccagtttgacaacgccttcattttccgctactccccgcgccgcggcactcccgccgccgccatggaggaacaaattccggaggaagtgaaggaagcgcgcaaccaggacctgctggccgtggtcaatgaaatagccatccggaaaaaccgggaactggtcggcaccgttcaggaagtccttctggaagggccgtccaaaacgaatgaagcgcgcctctccggacgcacctcccagaacaagcccgtgatggtggatgccgccccggacctggcgggagagcttctgcccatccgcattgaagaaagcacggggtttaccctgtacggcgtcccatgcccttccaggggatgatttgcacgccttcctcttccacccgcaaatagatggctccggtttccgggagacggtacacggccgttccctccggcacggggcattcatgctccgtggtgaaaatgaccgcgcgggcgcccgtggccctgatccacgcggcgctgtccaccggatcgcgcggatggtgcccgatgaccagcacatcagcccgcggcgtcattgccgcccgcgccagggaggaaaacccggcattccctatcatcaggacgaaccgcctgcggcatttccacgacagcacccggctccggtcctgatggattcccgtggacaacggcacgggaaaatcttccagaacaagttcatttccagggcgaacccgccatttccgaacggaacattccgcatccgctgcgccccagttccggattccgggatattccttcgccagcgcttccactccggcgcgctccgccctgccgttcccggaagccagcacgccggaaggccggataccacgcgccttcaatacgggaagaagggtgtaccggaccgcattttccgttcctgcggccacgaccagcgcgggattggagatgaccgcggaccaggcgtccttctgcaacggaacgatgaccgcttcattttccccggcaggaggtgcggaagaaagatagctgcacggcagggaagccactcccccggctaccgccagcatgacggaggccatccaggaagccgccgtattgcagacgcataaaatccacgggcaccacgcgaacaccagcccgaacagggagacgcccatgagcggaaaaacgagcacgctcaagcacaaattggtcaggggagcgtacaggttccaggtgccgaagtgccatgccgtcaggggaatggacatcagccacgcccccacggagatgagcagcgcgccgcggaacgctttttccagacgcacaaggcctttttcccgcgcattgtaaatccgggaaggaatgaacgggtccggagcccacaggggcctttcccggatgctccatcctgccaggcagacaatcacggcgaagacgcagaaggagagctggaaccccggctggaaaacctggagcgggtccatcaggcaaaggagaatgaaagccagcgccagaatattggccggatgccccttccggcgcagcacggacgccaacagccagaccgccgccatgatgaaggcccgcagggcggaggcggacatcccggtcacaaacacgtacaccgccagcaacggaatgcaggccagccgcgccgcacgggggcgcacgtacaacagcctcagcattcccagaaccagcatggccgccacccccacatgcatgccgctgacggcgaacacgtgcatgcagccgctttccagaaacttcgccatcgtttccggcttcgcgtccgtcttgtcccccagcacggcggaaaccatcacctgccgggcctcgtcatccgccggcgcgccttccctcagcaggcctgcggccccctcccggagccgcagggaaaacgcccggaggcggctgcaccagtcgcccggccccacccggcaggcgccatccagccgaatcccggcaataatgccgtgcaggtatccccaccgctcccgatcaaagatgccggggccgcacggggcctggagcggatatgtctctccctcaatccggtaccgttctcctactgccagggggcattccccgccacgggaggaaactgcgtacagccaccgggcaccgtccgggcggaacagcacggactttccggaaacggcgttaacggaaccctccatggcgacagtccttcccgcctctacgggaacattcccgtattcccggtcatacgccagcagatgcatggccgcccacaccgccagggcaatggccagcaggctcatggaaggagcccggaacaggcagggcaatagcgcccagcagaggcagaggccccagaaccagggggaaacgtccaccgccgcgcatgcgcacagcatggcgagagcgggagccagcaggggagccgcggccatggtccgttccggccacggccgccgcaggtggcgctcctgttccatccggggaaaagcttactgcatggcgtccgcgccgtcccgttccaggggaagaacggaaggcagcggaagaacgacgttggcaggcaggggggccttgcgctggagcaccttgggagccagcgcctcgctcgtctcataggcgccgcggaacatctccagcttggcgtccagattgtcaatgtaatgcagggccaccgcctccggggtcttggggaacacgggggagccgaaggccagttccccgtggtgggaggcgatcaggtgcagcaggtgcatgcgcacgtccggggaggcgggatccagcgtcttccaggattccgcttccggaagggccatgatgcgcttccacagattgttgaccagttcaatgcccagcggaatgtggcccagcagttccccggcttccgaatagggcatcgtgaaatcctccttcgggtagcagttttcccacagcttcccgcagtcgtgaaacaggcatccggccagcaggaggtcgcggttcagctccggattcgcctggcagacggcagaggccgtgcgcatcattcccgccacatgctccaccagtccgccgcgccgggcgtgatggtaagtgcgggcggcggcggcgcgctggaggcgttccccgaactgttcgatgaattcaatgcacagggcgcgaatgcgcggatcattcatgcccttgatgagcacgcaaatctccttcaggtccgcctcctgcttcttcttcaaggttccggacccggccaggaagctttccttctcctgttcgtccagggggcgcacttccagatcggccgcttccatgccgaagccccccttcgtccactggccgcgcaggctcacgaaactgcggagaggcagggaggccagcgtgcggaaccagggcttgtcctcccacaccttcagtcccatcgtcccttccgcatcggcaaaagacacgtccagatacggcttgttgctcttggtcatcttctgcgcgcactgggcgatctgggcaaaaacttccgcttccacctggccctccgcggccagcttgcccaactccatgagactgacttgttccatgcgggccatcttgccccgcttccctccatccgtcaagaaaacgccggaggactacgatgataaaaaaaggaaaccgcttatttttccaatactcccaactcggcaacggcaacatggctgccttccactacccgcttgcctacaaaacgcaggtaacgggctttcacgggcgtctccaggtcaatccgctgcggaacgggattggcgcggatattggaaaactctccctccgcggcgggagctccccaatcgtttccgtccgcactcaggtagatggcgtagcggtcaaccgtcccctttgcggaatccttgcggggcgtgtagatgacggcggcaacgttgaccggacgccccatgtcgatttccagcgcctgcggaggagctatttccccctgggcggcatgcgtatgccagagggtggaggggttgccgtcaatggccagctccggagcggcggcgcttctttccccggccgccaccttccagtcccgcgtagggacggggatgatctgcgcggttacggaagaccttctgccgcggtattcgcttaccgccttcaccgtccccccggcagggagaaggaaaggctccctgtacacggcggactgcgggccggggtccgttccgtccgtggtgtacctggtcaccacgccctccgcggatgccagggtcacccggccatcgcggtcgtaattcactgccggagcattcaggataacagggtacttccacagggaaacctcgcataaggccggaacggcccgggattcttccagcaccacgcgcacttcatccgccgtcacgggcctgcccttcaaaagaaccctggctcctatgctggaaccttccgtccatttgctccagcggccgttttcacgcacctccacgcggaacttgcgcaccctctgccccagttggacgggttccgccagccggatgacgtcaaatgccgcaggttccggcaatttcaacgccaggcagggatttttatcttccggagcggccgcccagtacgtcgcccgcttccggtccagaacttgttccgggccgtgccccttccatgaggaggaggaatccgcccgtgccccggaagcgaagttgcgggaatacagttcattcagcagcgcacggaaccccgccagggactttttatcctcttcatgaatgcggccgcggcggtccggcggcacgttcagattcaggttggcccctctgcccacgctgtcaaagtacagcttcagcagattctccggcgtccggacgcgggaattctcatgctcatgccagaaccagcccggacggatggaaacatccacttccgcgggaatccagtacttgccgtccacggtgccttccgtgcccaactggtagcgcacggtgccgggcgcgggttccgtcccggcttgcagcggaacgggggtgtacgtggcccagcagggatagcccgcataaccgctttcgttccccacccagcgggcgcccggccccacgtcggaaaaaatcaccgctccgggctgccgtttcttcagttccccccacgtcgtcttccagtcgtaatacgtgctccggtcaatggagcgcttctcccgcgttccaccgtaatagccgtcccctccgttcgctccgtcaaaccacgccaggaaaactgggccgtatcccgtggacaattccttcaactgctcacggtacattttgatatattccggcgttccgtaggagggggcattgcggtcccacggagacaggtaaatgccgaacctgacgccgtactttttgcacgcgcgggaaatttccttcactacatcgcccttcccctgcttccacggggaggccgccacgctgtgccgggtggtcttcgtgggccacaggcagaagccgtcatggtgcttgcaggtcagcaccactcccttgaacccggcgtccgccagcgtctttacaatttcgtccgcattgaaatcggaaggattgaacagctccggcttttcgtcgccataaccccattccttcccggtaaaggtattgatggtgaaatggatgaaggcatacatctccatgtcgtgccatgccagttgagccggagaaggaacaggcttcaacggggaaaccccattcttcactcccgcttccgccaacccggcggccagcatgcaggttcccataaggacaggggccaactgattcaatcttctcatcaaatgcataactaacgttcggaactatgtacgctccgggcatcccgttctttcagacaactctacgagttaaagccgtaccgcccgctgaagatggcctgtttcccgcaatcgcgggagaaacggggcgcctgcgcttttttccttttccgcccatcagggattatggagcaatcaatatattgaacacgtatccggacagaatgataaacgccgtcactgttccgaagaaaatccagatcagcttccaggtcatcaccttcttcagaagggccgcctccggcacggaaagccctaccgtcgccatcatgaacgctatcgccgtgccgataggaacgcctttcgccacaaacacctggatcaccggaactatcgccgccgcattcgcatacatcggaaccgcgcaaattaccgcaaccggcaccgcccaccaatgctcccggctcatggacgcttcaaaaaatccctccggcacatagccgtgcaccgccgctcccatggcgatgccgatcaccacatacagcgccactccctttacgatttcccacgcatcatgcatgatgacggcccatctcttccggaacggcgtccccttccgctcccacgcgccgctttcctccccggactggacaagcagcccccgtatccagggggacagatagcgttccagcctgaacctctccagcacagcccctcccatcatccccagcaaaatgccggagaccgcataaatcaccgtgatcttgaacccgaacgcccccaggaacagggcgatggcaacctcattcaccagaggcgatgtgatcaggaaggcaaacgtcacgcccagcggaatccctcctttcacaaagccgataaacaggggaatggaggaacatgaacaaaacggcgtgaccgccccgaacagggcggcgaaaaaatactgaaacccgtagagcttctttgtcgtcaaaaacacgcggatgcgttccaccgggaaataggcgttcaccacgcccatgaaaagactgatcgcgtacagcaggaagaggatcttcaccgtgtcgtacacgaagaagttgaccgcctcccccagacgggtatggggtgtgaactccaacaccccgtaaaccagccagtcggcaaaatcctgaatcataaccgggaagaattctcctaccgctctgcggaaacagccgggcggggaggttccccgcccccggaacgttcccggtgattcatcatcttaaccaccgccagcagaatgagcagcgccgcagcccagacggcagcccttttccatccgccctttcgcctggaggaagcgctgccgcagcagccccctcctccgcacccgcaggaacctgcctccggatggggaacattcccctttactgcccttgaatcctccggccttccgctacagcaacccttctccggagaatccgcttgaagcgctttttggagcatcctcctgatttcatcccgggagggtaccgtgccggaaacaagaatcctgccgtccacctcaagagccggggtttccagcactccggcggcggcaagttgcgcggcatccgtcaccttttccggaagcggttccaggcagagttcccgcatgacctgctccgtcacctgcgccaatgccgtacatttggcgcaccccggtccgtaaattactatcctcttcatgtaattattgatttatatttttaagaatatcaaaatgtatgaataaaaaatactgaacaaactgaataccaataccgttacccctttaacgccgggctttcctgcaaacacgaaagcacgctgctgaggcaggggcagcacagggaataatacacatttttcccccgctgctcacaggacactatccggctgttcttcaacacgttcaaatggctggaaacggtagacatgtcacgtccggaatccttctgcagttcgcagacgcagcgttctccatccagaagcatctccacaatcatgaggcgcacgggatgccccagcgccttgaaaacaccggcaagaggttccagctccttgacggagtgaaccggacgggatgaagaggtgcaggagcaatcggacataagcaatggatttattatttttaaaatcgtaaaaatgtcaatctgttttcccgccacggtcatggcacaccacacaggcacggagccatgcggcagccgcttgaaatcaccccccatgctggacacggcaattcccttccgatatgctcgtttacacacctttaccgccatgctgtacatcggatgccacctctcctccgcaaaaggttacgaagccatgggcagggttgccctttccatcggagccaacaccttccagttcttctcccgcaatccgcgcggaagcaaggccaaggccattgacgaaccggacattgcccgttttctgaagctggcggaagacaacggcttcggcacgctgctggcgcacgccccttatacgctgaacccctgctccgctgaccccaaagtcacccgctttgcggcccaggtgctgagggaagacctggagctcatggagtatctgccgggcaacctttacaacttccatcccggcagccacgtgggacagggagtggaaaaaggcattgaactggtggcggaccaactgaacggcgtgcttgctccggaccaaaaaaccaccgttctgctggaaaccatgtccggcaagggaagcgagctcggcaagacctttgaagaactggccgccatcattgagcgcgtggacctgaaagaaaagctgggcgtctgcctggacacctgccacgtttattccgccgggtacgacatcgtcaacagcctggacgccgtgctggaacagttcgactccgtgctgggcctggaacgcctgaacgccatccacctgaacgacagcatgacgcctttctcctccttcaaggaccgccatgaaaccatcggcaaggggagcctgggagaacaggccttcatcaacatcatcaaccatccttccctccgggaagtgccctttttcctggaaacgccccgggacgacgccgggcacggcgaggaaatagcctggctgaaagaacattaccgcggctgacctgccccaacggcagccccgtaccgtctggaagccggcccttcttccggagaaaaagcttgcacccgccccggatacggtatacacaaggcctataaattagtttaaactaattccaatatctgcttttcaaggcagaacccatccggcttttatgaaagaaatgcgcatcgcaaaaataacagggcgtgaaattctggattcacgcggcaaccccaccattgaggcggacgtttatctggaaggcggagccacaggcacggcgggcgtccccagcggagcttccaccggggaacatgaagcctgggaactcagggacggcgatatggcccggtaccagggcaagagcgtcaccaaagctgtggacaatatccgcaacgtcatcgccccggccctgatcggcctggaagcgacggaacaaaccacggcggacgccctcatgagctctctggacggcaccttcaacaaggccaaactgggagccaacgccattctgggcgtttccctggcgcttgccaaggcggcggcggcccagctgcaacagcccctgtaccgttacctgggaggcccgaacgccaaggttctgcccgtccccatgatgaacatcatcaacggcggcgcccactccgacgcgcccatcgacttccaggaattcatgatcgttccgtccggcgcgcctactttccgggaagccctgcgctatggcgcggaagtctttcatgccctgaaatccgtcctgcacagccgcggcctttccaccgccgtgggtgatgaaggcggcttcgctcccaggctgaactccgcggaagacgcgctggactgcatcgcccaggccgtggacaaggccggctaccggttcggggaggacatttccattgccctggacgtggcttcctccagattctacgatccggaatccggactgtacgttttcaagaagtccgacggcagccgcagaaccgccgcggaactgacggattactacgtggaactgaagaagaaataccccatcgtctccattgaggacggctgtgcggaaaacgactgggacggctggaaaatcctgacggaaaaactgggcaaaagcacccagctcgtcggggacgacctcttcgtcaccaacgttgaattcctcagaaaaggcattcatctgggcgtgggcaactccattctggtgaaggtaaaccagatcggctccctgacggagacgctggatgccgtggagttggccatgggcaaccgctacactgccgttatttcccaccgctccggggaaacggaagacgccaccatcgcggacatcgccgtggggaccaacgccggccagatcaagaccggctccctgagccgttccgaccgcatggccaaatacaaccgccttctccggattgaggaggaactgggggaatctgcccgctacggcaacggattcggcctgttctgaccccttttgccggaactggtataaagcaacccaaatccccggtcgtcgtgaggcggcgcggggatttttcattctccggggtaattgcatccttttctttgggacaaaatatgcaatgctgggctttcggattccgcattgccaaaaagccccatctccgttccgcgccatgtctcccagcctttccctgcccacacgccccctgctgtgcgcggcactggcgtacctggcgcttcctctgggcctcttcctgtggggatggctgcatcccgccttctccgttccgctttgcgccgcactggcgtatggattttacgcctgcacccggaatcttccggaacagcggcttcctctgaaagcccgcggactggccgtgctgggctttctgtccgccttctgcctgctgctggtgctgctgtgcggcttcacgggccactgccagcagcacgcggactttgcggtccgcaacgccgtttacgaacagctcgcggcaggctcctggcccctcgtcatggcagacgggcgccacttcatctactacctgggccattggctgcctcccgcgctggccacctcctgctgtccggatgcatgggctccctggctgctggccctgtggaccttcctggggctggaactggcgttgctggcagctgcctcccgctggggcgtccggcaaacggcctggtgggcgctggttctcttctgcctgggatctccggcagcggcgctggactgcctgggaatgcccctcccctccctgttcgcggaatacaatgcccagatggtgctgttcatcggcatgcccgcccaactcttcaacacgttcaaccatgccgttccggcgctgttgtgcgccgtgcttattctgacccgctccctgcctgccgcgggatattatttcatgggggcattgctgctgccgtcctccccgctgggcgctcttctgctccttccgtacatagtgtatgaaaccctgttctgccgcccaacggagcaggcttctccttcccggctccggtccctcctgctccagccggctttctgggttgccttcctgtgcgcggcggtcatggccgtcttttatgcccatctggacggtggggggcagttttcctgcctttttgccgggaagtatgcggaaatctaccactacggccagcagcggctgctgctctatcccggctccgtcaaatacgccagtttcctgctggctctggccctgggcgttctgctgccgggtgcgctgctcttccaagcatgccggaggaatccgctgtactacatcacgctggggatgatggcaggcagcctctttttccgcacgggcatcatgaataatgaacttctctttaaagccccggcggtcctctatcccttcctctccctgctctttctccatgccttccgccaggggggcacgaaataccggacactcctgattctttacctggcctgcacggcccttccgtccctgcaatgcatgatggaaaaagcgggtacgttctccacccgggcaagcactatgcaggagcatcagctgacggcgcacggcggcatgcttgaccgccggaaagaccccgtctgccgccaattcgtcaaaaaggacggccatcccctccccgcctggctgttcaagaccggaacaaggccataacgtcacggcggcgggaatcaatccagcctgatgccgaacatgtccgacagggacccggcatccttgtccagcgcgtcttctccgccgggaacggcttccggagccttcggaatcagggcggaggcgtccattccgcgcagggtaaacagcagttccggctgttcgtccagcatcacgccgaaggcgtacaggaccgcggacgcatgcttgcacaaatccgcccagtccgggcaggaacaggaaaaacgccactcttccggcgcggggaacaggccgccctccggatcgcacaggatttccagcagctccggggagaggttccccttcagcaagtcaatccaggaaccgatatgcccggcgcaccgcgcacgcagccgggcaagcgcctcttcatccggaggggcggcatgcacgcggacctcatacaaatgctcccccatcaccagcgcgtcaatgcggccgggagccgctttcacgtccagaacgcagccatagcgcaaataagtacgcccgggggccagccgcatgccgtacacctcgcacgcggccaggctcttcatccattcctttccccagaactttttcgccagatttcgcccggaagccgtcacgggatgcagctctatcccctccgcggccagttccgccgccttctcctccgcgcgtttccgcaaatccgcccgtttcaggggcatgccatcattttcacacatatgatattttaccttttattccataaagaacggcttatgaatcattcactaatgttctttaggaactgttctcagcatgaaatctccaaataaaggtaccgtgaatgccaattctccataagaaggactatatatcattccctttttcattaaatgggcccgggttggacctatcttgttcacagtaactcccagagcatgtgcaatttctccggctcgcatcctttcagatcttaattctgccatggttctcaggaatcttttttctcccggagtaagccgatcaaatcttacacggaaaaaattttgatccaatctctctataaccttctccgttgcccgattaattacatccaatgtaatattttcagtttgcgcctgtttccaagcctgatatccccattcttgtaaaaaatacggatatccatgagtaagttcatatattttatcaagagcatcatttgcaaatacagctccctcccttctggccggttcctgcaatgcgcgagcaacatcttcctgggataaagctccaacatcaggaaaactgaataagcgttcagcataggatttagaatctccggccaaacccggcaaaataggaagcccggcacctaataagacaataggactctgtttctgttgaattctatgcattgccataatcaatgcacttaattccttctctttaaaatattggatttcatcaataagaatggcaacagcggattgtttttccatggctgcctccgacaatgcctgaaaaagctcaggcaaatcattttcaaggtctccgctgtccgctacacccggtaacggatccaagtccaatcccaaatctccatagttaattctgatagttccaataaaatttctaagagcaatcagcccccttttaactttatcacctgttccggccaatctgttcaattcaaaaaacaacctcctcaaatatggagcaagactggcacctaaagatttattttcatgtgcttcaatcgagatcgtatgatatccatgttgttgcgccaatcgttccatttcattgagtagaaccgttttccctactcctctcaaaccagttagaagcatgcttttttctggtctcctattcaaagtacgccctaataaaatctctgtttgtctaagaatgctggacctccctaccaactcgggaggaggagagccagcacctggtgaaaagggattttttatttcatccataatatagcccgttatagtaagtatacttctaaggcttttcaagtagaacttactagaccttcttacctcttcttacctcttcttacctcttcttacctcttcttacctcttcttacctcttcttacctagttctacctagttctatctagaatttaatagaactaggtagaataaaaactccattccaaatccgtccacattacctatttcaagctttcaaaacaacatggcttcaggcacaacatgtgggtcatgtggaaaggcagattttctaaacccaccgctgatctggttcaacgctacggcgaatccgtctcctacgactggaggctcttccgccaggacattgccggatccatcgcccatgcgcgggcacagctcaaggcaggcctgctttcgcaggaggaattcagcgccattgaatccggcctgaaggacattctgaaggacattgaggcaggcagcttcacgtggagccgggagctggaagacgtgcacatgaacattgaaagcgagctgacccgacgcatcggcgcgccgggtgccaagctgcataccgcacgctcccgcaacgaccaggtggctacggacacacggctttactgccgggcggagattgatgaaatcctggaaaaagtgcgccatttgcagcgtgcgctggtcatgaaggcgaaggagtacgcggacgccatgatgccgggctatacccacctgcagcgcgcccagcccgtcacgatgggccaccatttgctggcttacgtggaaatgctgaaccgggacgcggaccgcctcacggactgccgcaggcgcctgaacgtttccccgctgggttccggagctattgccggttccaccatctgcctggaccgccgcgggattgccgcagaactgggctttgacgccgtgacggagaattccatggatgccattgccgaccgggattacatcatggaaaccctctttgacctggccgtgatcggcgcccacctctcccgcatgagcgaggacgtcatcctgtggtgcacggcggaattcggcttcgccaccctgtcggacgcccataccacgggctcctccctgatgccccagaagaaaaatccggacgtcgccgaacttacccgcggcaagacgggacgcctgtacggcaaccttaccgccgtgatggtggccgtcaaggggctgcccctgacctacaaccgcgatctccaggaagacaaggaacccctcttcgattccattgacacgatcaagctggccctggacgtcaatgcggagatgatggccgccatgacggtcaacacggcccgggctctggaagcggcttccgatcccatgctgctggctacggacctggcggactacctggttcgccgcggcgttcccttccggaaggctcacgaactggtcggaaaagccgtcgccatgagcatttccacaggtacgcccctcaaccagttgagcgacgaacagttcgcctccatttcagacgcgtacggaaccgccgcgcgcgacgtatttgaattgacaaaagccttcgcccagcgtaccaacccgggggctcccaattccgagaatacccgccgccgcatcgcctactgggaagacattctttccaaataacactgcctgcggggagcggacggaacggggaacctgccgtccgtctccgcggcgcgcctccgggtgcaggaaggggacgttttacacccctccggcggcggcattccaccgcagccggccaacatcccggcagccatgttcagacctgctctcctttcctctctcaagacctataccaagcaaacttttctggcggacctcttcgcggggctcaccgtcggcgtggtggccatcccgctggcgatggcctttgcgattgcatgcgggctctcccccacccagggcctcgtcaccgccatcgtagccggcttcctcatttccctgttcagcggaagcaagtatcagataggcggtcccaccggcgccttcgtcatcatcatcatgggcgtgctggaacagtaccacgcgtccggactgctggtctgcacgctgatggcgggcctctttctcattatcctgggcttctgccgcatgggggcgcttatccgcttcattccattccccgtcaccacgggatttacctccggcattgccgtggtgattttctccacgcagatcaaggacatcttcggcctcaccatcacggaaaaaatccccggcgacttcattgaaaaatgggcgtgctacttcaactacttccacaccatcaactgggcggcgctggcgctggccgtcggcaccgtcgccattaccctgctgagccgccgcttctggcccagggtgccggccatgctggtgggcatgctgggcatgaccgccgtttccgtagccttctccctgcccgtaaccaccatcgggcaggccttcggcagccttccgaacacgcttcccctcccttcactgccccacattgaatggcacaacctgggggcgctgacggctccggccttcaccatcgccctgctggcggcgattgaatccctgctgagcgcctccgtggcggacggcatgacgggaggacgccacaaacccaatatggaactcattgcccaaggaatcggcaacatcgggtccgccctgttcggcggcattccggccaccggggccatcgcccgcaccgctaccaacatcaaggcgggggccaaaagcccggtttccggcatgattcacgcggtgacccttcttgccatcctgatggcctttgcccagtacgcccagcagattcctctggccgtgctggcgggcatcctgacggtggtgtgctacaacatgagtgaaatgcacacgttcagccgcctgctgaaagggccgcggcaggatgcggcggtgctggtgatcaccttcctgctgaccgtctttgtggacctggtcgtggccgtggaggtgggtgtggtgctcgccgccctgctcttcatgggccgcatggcccagatcagcgacgtttccgccattaaaaacgagctgctggataacgacgaggaagacgacgaagaccgttctacggccaaactcagcattccggaaggcgtggaagtttttgacgtgaagggccccttctttttcggcgccgtggaacagttcaaggaccaggtgctggaaacgctggagcacgataccaaggtagtcattctgcgcatgcgcctggttcccgcgctggacgccaccggactgaatgttctttccgacttctgccatcagtgccgggagcacggctccaccctgctggtctgcggcgtgcagccgcaacctctggacgtcatccgccacgcgcccttttaccgggagctgaaacgctacaacatctgcgagaatattgacgccgccctgaaccgcgcccgcaagatcatcaacggtcccgcgccaaaacacctgtaacggcggctactccccccgtgcggccaggtaggccgcgccccattcattcatggcttccagtacgggcagcacgctcctgccgaaggccgtcagggaatactccaccctgggcggaatgacggggtacgccttgcgttccactaatccgtccgcctccagttcccggagctgctgggtgaacatcttggtggtggcctccgggatcaggcggtgcagctcgttaaacctcacgggagccttctggtaaagatgccagaggatgacaatcttgtacttcccgccgatcagggaaagcgtgacgccgcaggggcaacggtaggaggatgaaggctttttcatcgttacagtatcttttttgacactatattacaaaatagtgcctacttgtcaaaaactccctgtctctctatgctggcgggaattccaatccacacagccatgaaactgaccatcgaccaagacaagtgcatccactgccatttatgtgaaaaagcctgcttcctgacccgcttctgcggcttcgattccctggaaggagctgcggaacaatactgcatcggctgcggccattgcgtagccgtctgcccgcggcaggccattacccactccggagtaaaaagcacggaacccataggccccgttccgggcgaagcggaagtgctgaacctgctgatgaaaaccaggagcgtgcggcacttcaaaccggaccccgtcagccgggaaacgtggaacgtcctgcgccgcgcggcggaatactcccagtccggcctgaacgcccagagcatccgcctgacggcggtggaagacccggataccctctccggcatcagaaaggccctgctccgcatgtacgacaagctggaaaggctggccgccttccccgtcacccgcctggccgcccggctagccctctccccgcaggattaccacgccgtcatctctgaaaccgctacgcaacccctgcgcaggcaggcggaggaacggggggaagaccccgtactgtacggcgccccggccctgctcctgctgaccggcccggcgtcacaaaccgcgcgggaagacgctacggtcctctcccataatatcatgatggccctgaccgcgctggggctggggagctgctacatgggcggcctggtcctgggatgcagggttttcaagtacaagccgcttctccgcgccctggatttgccgaaaggccacgcggtccatcaggcccttgtgctggggacgcccaccgtacagctcaaacgcatgccggaacggaagcgccgtaaaatcaggttccggtaagcttccccgtcaacggtccgcttcctgctcctcatagcgggaaaggaggaaatccaggtcttccagcagggtctggcaggaacggtcccaccgcttcctgccctggagcgccatcacgcattcctttctcccggtaaaacagtatttggtaatgccgtgcacctgcaattcttccacctgctttttcagctcacaggcaaaaaacagccagaacggcacgctgcgggcaatctccgccacgctgaccgtcatggggggcgtttcctccttcagctcccttgccaggtgcgccaggcctacctccgtaagcatgcggcgcaggcgttcatacagctcggacacctgcatgacggacaggtcgcactcatgctccagataatagcgaacggaggccagcaggtcatccttgaacggcagggtggttccggcgcgccgggcggcatgttccagggcatccgccagccactgttccccgtactcggtgatcaggcaatcaccaagcttgagcagcggtctgttgtttcggaagccgatcatggaacagggaaaaggggaaaatttaaaggatgggaagcttgcgctggagaggatcaatcagcgtctggtggcgcatctgcgtgatctcctggatgaactcctccacattggaaaactggcggtacacggacacgtagcggatgtaggcgacgggatcgatggcgtaaagtttttcaatcactttcttgccgatctcgctggagggaacttcgcgcaaatggtcgcggtgcaattcggaaataatttcttccacggcgcggtccaagcggtccatgctcacgggcctcttttcacaggccttcaccaagccgcgcaaaatcttctcgcggttcagggcctcccgcaggttgtctctttttacaacgcgcagctccgtacgttcaatctgctcataggtcgtgtaacggtaatcgcacctcaggcacacgcggcggcggcggatggtcgtcccgtccttggacatacgggagtcaatgaccttatcctccaaatgaccgcactgaacgcatctcatggcacgaccatactactacataacgcatccataaaggaaaaagtacgccaaatatagtacagaggccttaatggtcagcatctcccaaccaacacttcctgtgaataagccggggacaaaaacactcccgtccgcgtttccgcacggattgacggagatgccggaattgtgaataagaggcaggcgagcttccatgtactccgggtgtgaagacacattttttatgctctcctcccaccggaataaaaaccgggaggattccggtccgcgccagggtcgttcatggccgtccgttacgggttcaccgttccgccttgattgacgatactgcccgcagccagcctggcgccattcagattcaatacagcgccgtctttgacgaggactctgcccagattcagggcctgtccctccattccttccagggacatttccacctttccggacaagatccaggaacatttcaaggaagcgggcagcacccgtttcaacacgacgcgggccattccctccgctccccctccgccttccgcacgaaccacctgcacttccgcctgtccggacaagcggacggggtgggctttgtcctggaccggcgagggcttgagttccacggtggagcctcccggaatattccaggcctgacggcccgcaagctgtacatttgtctccaactgcaaatttttcccctccgccaggcggatgcctcccggcccaagcgccaaacggtcgccggagccccctcctttgctctgaataatcacggtattaacggcggggtcctccacacggatgccgaacagcttcaccacgcccgatacaatgctgggttttacggaagaagccaagttccacacgcccacgtttttccccggcatcttccggttcatccaggcatccggagaaccgagaggagcctcatagcggccgctgcggacggaaccggtatccttcccggccagacgggcggcttcataggcaaagcgcgcgccgatgctgatctgggactggccgttgtaatgcacccccatctggtcgccggcagtcagcttgggaaggtccctggtaggggcatagcccagggacggacgggaggcggccagctccttcatcacctggtgggtcgtttttccctgaacttcggtatcattccccttcaggcctccggtgacattgcccgtctccggatcgctttcattctttccggcccagttggcattctcgccaatgacggctctctgtacggccagggcggacgtatccccgtacggtttcaagtccgccgccagattgcccagaagctccagaaaacgggaagcgctttccggaacggaagcgccgatattgctttccccctgcaaatacagcagcccggcaaactccactttggagtatttggacttgcctaccgtggcacaggcgtttttgacggcctgcaccagcgccttgtaagcctggccgttcttttgccagtgggaattgccgccgccgtcgcgggaggctttcacaatggccacatccgcatccctgaaccatccgttcttctccagggtaaaggcaaacccgtattccggacccatgcacaaattgccgttatagcgcggcatggcgggccgtacctgctcccaggacgtggaggccccgggaaacaccccttccctctggccgaagttttcatgccagtacaacgtcttcttcggctcatacttcttcaacaactccggagaagcgggactgcccttcacggctcccagggaattggattggcccgtcagcaaaaaaatcttcaattcttttgcggagcataccgaaacaaggcacaggaacaggaaggacagcagataggtcatttgagttacaattgcaggaacacaactataactgccggaattttccttttcaatcgtcaactgccagatatgggagccggaaggaggaggaaaaggaaaagaccagttcttcttctatgctcccgatgggcagcatagcccccttattgattttctaccgaagagcttggaggaggcaaaggcgcgacggctcggacaggcggcatgtaccaaatgttccacttagccggaggaaggaagatcgcgccatcaagaaaacgaacaagccccgccagttgaggaactggcggggcctgatgaaaaaaaatcccggcggcgacctactcttgcgggacctatcgtccgactaccattggcgcggcagcgtttcacttccgggttcggaacgggaccgggtgggaccactgcgctctggccaccgggcttcagggggaagagggctttttttctcttcatcctgcctgcccgggagcccttggggggctttgagggggattttttaagggttgttgtgtgtgtggctaagaagatttcctctcgttacgaggggaaggaatcagcgtaaactgacatctgcgtggctggtggtgttacttttaaacatacatccaatgaacaagacaacagcaagttgttattcacgaacgggagtgatgtaatatgatgaagtctattggtgattagtatcgcttggctcaatacattgctgcacttacacctgcgacctatcaacgtggtggtcttccacgaacctatagggaaaactcatcttgggatgggcttggcgcttagatgctttcagcgcttatcccgtccgcacttagctactcggccatgcacttgacagtacaaccgatgcaccagtggtgcgtcagacccggtcctctcgtactaaggtctgaacccctcaattttccaacgcccacagaggatagaggaccgaactgtctcgcgacgttctgaacccagctcgcgtgccgctttaaccggcgaacagccggacccttgggaccttctccagccccaggatgcgacgagccgacatcgaggtgccaaaccacgccgtcgatatgaactcttgggcgtgatcagcctgttatccctaaggtaccttttatccgttgagcgacggcaattccactttctaccgccggatcacttgggcctgctttcgcatctgctcgacttgttggtctcacagttaggcgggcttatgcccatgcactcgacacccggttgccaaccgggctgagcccaccttcgcgctcctccgttactctttgggaggataccgccccagtaaaactgaccggctgacacggtcctctggccggattcacggctcagggttagatcctccagtttcaaagggtggtgtctcattgatgactccgacgccccctaaagggcgtcttcagcgtctcccacttactctgagcattaaaaccgaagaaacaatgacagcttacagttaaggtctatagggtctttccgtccttctgcgggtaggcggcatcttcaccgccactacaatttcactgagcgcctggttgagacagtgcccaactcgtttcacgattcgtgcaggtcggaacttacccgacaaggaatttcgctaccttaggaccgttatagttacggccgacattcaccgggacttgggttcagagcttcgccttgcggctaaccccttgccttaatctttcggcattggtcacgtgtcacaccctatacttcgacttgcgtctttgcagagtgctgtgtttttgataaacagtcggttgggccatttctctgcggcctgcatcgctgcaggcaccccttcttccgaagttacggggctaatttgccgagttccttaaccaggtttcactcttacgccttggtatattctacccacccacctgtgtcggtttgcggtacgggtcgcttagcatacgctggggcttttcttggcactcgatccaatgatgcgctgagtccgtggactcaactcggaattcaataacctagtcatcttttctcatgcgtccccccagtttaagggtcgcgagctcaggattattaacctgatatccatcgcctacgcctctcggcctcggcttaggtcccggctaacccagggacgaaacacgttgccctggaaacctcgggtttacggcggccggggatttcacccggctttacgttactcatgtctgcatactcacttgcatgtgctccagggtcagtcgccatcacccttcaacgcgcatgcaacgctcttctaccactctaccgtaaggtaaagtccagagcttcggtataacgcttgatcgccaatcattttcggcgcaggatcactcgatgagtaagctattacgcattttttaaatggtggctgcttctaagccaacatcctcactgtctgtgtaatcccacatcctttccactgagcgttatttaggcaccttagctgctggtctgggttgtttccctctcgacaatgaagcttatcccccactgtctcactgccacgttccattgcacggtattcggagtttgataaggtttggtaagcgggtgtgccccctagccttgtcagtgctctacccccgcgcatcagcacgtgacgctgcacctaaatgcatttcgaagagaaccagctatcacggggtttgattagcctttcactcctaccctcagctcatcagagaacttttcaacgttcacctgttcggtcctccacatggttttacccatgcttcaacctggccaagggtaggtcacctccgcttcgggtccagtacctgcgacttaattcgccctattcggacttgctttcgctgcgactccgggccggaagcccttagtcttgccacaaacactgactcgcagactcattaaacaaaaggcacgccatcgcagattgctctgctctgacactttgtagacatacggtttcaggttctatttcactccgctcacagcggttcttttcacctttccctcgcggtacttgttcactatcggtcgccaactagtatttagccttgcgcggtggtccgcgctgattcatacatcgttccacgtgtgatgtattactcaggatcccactaattcccacgctggatttcgtctacagggctttcaccttctacggccagcctttccaggctgttctactatccagtatggtcgaatatctcgtggtcctacaaccccgaaggagtaccttcggtttgggctccatccgctttcgctcgccactacttacggaatcgatttctctttcttttcctccgcttactgagatgtttcacttcagcgggtttcgcgtttcataccctatgtattcaggtatgaacgatcgagtattgcctcgatcaggttaccccattcggatacccccggatcatcgcttgcttgcagcttcccgaggattttcgcagcttgccgcgtccttcttcgcctgttggcaccaaggcattcaccgtacgcccttacttacttcatcatattgcaaaagttttttaccacttccacaataccacaaagccctttcgtgacttactgtattgtcttatttcttggtatgcatgttttaaattgtgtattgtagttgtttttcaactacccactttgttggaaagcaattgcttctcagcaattgttttctttgccacgcagatgtcaattttcgctttccctcaataatcgatttttttggtgggcctgacaggacttgaacctgtgaccccgcgcttatcaagcgcgtgctctaaccaactgagctacaggcccggttttgggtctcgcagaggcagttaacagtgaacaggcaatagttaatagccatttatcgttctccgttgccgccttcttaccgaaactggtggaggcacggggactcgaaccccggacatccagcttgcaaagctggcgctctaccaactgagctatacccccagttgcggttctttttgaaaaaaggtcgtcacgcacgtcgtgcctagtttcgctccaagcgaactggctgtttacacatctttggttcgttgcgggccctcgcgggtttcgctctctcttccctcgggaagagatccgacctgtgcatttttcatgcactttctccatagaaaggaggtgatccagccgcaggttcccctacggctaccttgttacgacttcatcccagttaccagtctcaccttaggaccctgcctccttgcggttggcttcagatacttcgggtgcgaccggcttccatgatgtgacgggcggtgtgtacaagacccgggaacgtattcacggcgccgtagctgatgcgccattactagcgattccggcttcgtgtaggcgggttgcagcctacagtccgaactgggcccagtttttaggatttcctccgcctcgcggcttcggccccctctgtactgggcattgtagtacgtgtgcagccctgggcataagggccatactgacctgacgtcgtccccaccttcctcccagttgatctgggcagtctcgccagagtccccacctttacgtgctggtaactggcaacaggggttgcgctcgttgctggacttaaccaaacatctcacgacacgagctgacgacggccatgcagcacctgtgtaacgcctccgaagagtcgcatgctttcacatgttgttcattacatgtcaagcccaggtaaggttcttcgcgttgcatcgaattaagccacatactccaccgcttgtgcgggtccccgtcaatttctttgagttttaatcttgcgaccgtactccccaggcggcacgcttaacgcgttagctccggcacgcagggggtcgattccccgcacaccaagcgtgcaccgtttactgccaggactacaggggtatctaatccctttcgctcccctggccttcgtgcctcagcgtcagttaatgtccaggaacccgccttcgccacgagtgttcctctcgatatctacgcatttcactgctacaccgagaattccggttccccctccattactctagtctcgcagtatcatgtgcagtccgggggttgagcccccgcctttcacacacgacttacgaaaccgcctacgcacgctttacgcccagtgattccgaacaacgcttgagacctctgtattaccgcggctgctggcacagagttagccgtctcttcctcttgtggtactatctttttaatttgctcccacatgacaggggtttacaatccgaagaccttcattcccccacgcggcgtcgcaccatcagggtttcccccattgtgaatgattctcgactgctgccacccgtaggtgtctggaccgtgtctcagttccagtgtggccggacatcctctcagaccggctacccgtcatcgccttggtgagccgttacctcaccaactaactaataggacgcgagcccatccccaagcgcattgctgctttaatcttgcgattttatgcggtattaatcccagtttcccggggctatcccactcttgggggcaggttactcacgtgttactcacccgtgcgccactagagaattattagcaagctagcaattctctcgttcgacttgcatgtcttatccacgccgccagcgttcgttctgagccagaatcaaactctccatcaaatataatttttgaaattgctggaccaaatggaatctttcgatttcatctgcgccatgcttcagtcagctcttccctcaagttgtgtctcttgaggtcctcttcgctctgccaagcacggcgcgcgtcacgaccttttttctttccccttgcttctaccaatccgcccctctcggagctaggtcgctccttcgggttttttctccctcacacgtctctcgacgcattcaggaaaaccctcggcgggttcggtagtcattcccttgaaatcttcttatcggcccctttaatgaggctcttccgggtggccggccccggcttcattcaggccctcttccgagtccctcctgccgccgggcttttcatcccgtcgccgtgttggcgtgccgagaagtctaccattttcacctcccttgtcaatttttttcgagtcgttttttgtgagagtctttcacccattttgtcacgtccattcataacttccaatttataaaatagttaggcttttgtcatactccccctccctcgtgccatttttttgaacattttctcccgtgatgtttccgcaataactacagttcctcttttttgccccctgccaggacgaaaaaaagggctattgaacgcaggtgcttcctccgcccacctccattgcattccttcccttgaaaaggagactgaaccattttgttttcccatggacggaaaggattttttctgctatctataggaagtttttattattttgccatctatgaaaagatcattctggattggaactatctgcgctgcctgctgcctgggaaacattccttcctcatccgctgtacaaacagccagtataggctccactttttcctgcaccttcctggattccggggaccagggattttttgattcatcaagcacccatacatgggaccaaggccagatagacgctgccatgcgggcgttgaccacatgggatagcttgatcaattccaccccgggcagaacacttactgttggcctcacctggtacgacggagccaattcctccactctggcctccgcctattccccttatttctactaccagtcaaatggaccgcaacaggtttccaccctggtggagtccgtctggcgcgatgggagcacgaggactgcaacgggttacgatatttacatccagtgcaatacctctcatttgaattctctttattacgaggtcgccttaccggcggagcatacgggaaaatatgattttcaaagcatcctgacccatgagatagggcatgccgcagggtttctttccctggcgacacaaaccggtaccttccaggtccagtccgggaatgcttcagcagcttacagcaccatgctgtacaccaggtatgattccctgttaaccaaccaggaaggccaatccatcgtgaataaggccggaaacgggaatacggcatttacacttggagaaaccctgtccctgggcgatacggggctcaccgcctataaccccgccacctggcagcaagggtccagcatggcccacatcgacagcgcgagcgatccggacgccctcatgcagtattccatttcgccggatacctaccaccgtaccctgacggatggagaaatggaattgatgcgttccatgggctggaagatggttccggagcccggcacctccacgctttccctgctggggctggccgtgctcgctttacgaagacgccgctgctgacggtttcctctcccggattttcctttcacgtcggccagacggcagtttcctttagccgccagggagtggattggtagcagaagggcgttcctgccagggaacgcccttcatggtttttcccggcggcacaccggaaaagcagccttttcagttatttcttttccttggtaaagtccagcttgccgcccttttcccgcaccacgatttccgtcccttccgggaagtcgccctccaggagcttgaggctgagggggtccagcaggtcatgctgaatggcccgcttgaggggacgcgctccatagacggggtcaaagccatggtccgccaccagggccgtagcctccggagtcatgcgcaggaacaggcccttggcttccaggcgcttgcggacgcgctggagctggatgtccacaatgcctttgagttcctccgccgtcagacggtcaaagatgatgatttcatcaatgcggttcaggaattccgggcggaagtggccgcgcagggcttccatcgccttggcttcccgctgttccgcgttggattcattgaggatgtactggctgccgatgttggaggtcatgatgatgacagtattccggaagtccaccgtacgcccctggccgtccgtgatgcggccgtcatccaatacctggagcagcacgttgaagacgtctggatgggctttttcaatttcatcaaagaggaccacgcagtacggacggcggcgcacggcttcagagagctggccgccttcttcataacccacatatccgggaggcgccccgatgaggcgcgccacggagtgcttttccatgtattcggacatgtcaatgcgcacgatggcgttttcattgtcaaagaggaattccgccagcgccttgctgagctccgtcttgcccacgcccgtggggcccaggaacaggaaggagccgatgggtctgttttcatcctgcaatcccgcgcgggcgcgccgcacggcgtcggacacggccttgacggcctgcttctgcccgatcacgcgggcgcccaggcgttcttccatgtgcaccagcttggcgcgctccccttcctgcaggcgcgcggcgggaatgccggtccaggtggccaccaccttggcgatgtccccttccgtgacttcctccttgagcaggcctccgtcctccttctgcattttgttgagcttttccttgccttccatcagggcgcgttccgcttccggaagttcaccgtacgtgatttcggaagcgcgggtcagatcccccattctcttggccctttcgctttccagcttgagggcctctattttttcctgttccctgcggacggcgtccagaacgtctttttcacttttccacttggcaatcatggagccggatttttccttcaggtccgccagatccttggtgattttttccagacgcgccttgctgtcggcatcctcttccttcaccagggcctgccgttccatttcaagctgcatggcttcacgttcgatctggtcgatttccgtaggcatggagtccagctcaatcttgagccgggccgctgcttcgtccaccaggtccaccgccttgtcaggcaggaaacggtcagagatataacggtcggaaagagtggcggcagccacgatggcggcgtccgtaatgcgcacgccgtggtgaacttcataacgttccttcaggccgcgcagaatggcgatggtgtcctccacgctgggttcagacaccatgacaggctgaaaccgtcgttccagggccgcatccttttcaatgtatttgcggtattcgtccagcgtcgtcgcgccgatggtccgcagttcgccacgggccagagcgggcttaagcaggttggaggcgtccaccgccccttcactggcgcccgcgcccacgatggtgtgcagttcgtcaatgaacaggatgatttcaccgttggagtccgtcacttccttgaggaaggatttcaagcgttcttcaaattcgccgcggtatttggcccccgcgagcatggacccgatgttgagggacacaatgcgcttgttgcgcatgctttccggcacgtcaccgttgacaatgcgccgcgccaggccttctgcaatggcggtcttgcccacgccgggctccccgatgagcacggggttgttcttggtccggcgggaaaggatctggaggacgcggcggatttccgtatcacggccgataacggggtcaatcttgccggcgcgggcgcgggccgtcaggtccgtgccgtatttttccagcgtctggtatttgccttccgggttgtcgtccgtcacgcgctggttgccgcgcacttccttcatggcggccagatagttgtccttggacagtccaaaggtgtccgtcaactggtgcaccttgttctgcgtgtccagagcccccagcatgaagtgctccacgctgaggtagtcatccttgagctttttgcgttcatcctcggcagcgtgcatcaccgtagccaggtcacggcccatctggggctgcgtggtagcaccgctctgggtgggttcatgggatacttccctctgggcggcctgcaacagcaggcccggatcacaagaggccttccggagaataggggaaagaattccgccgtcctgctccagcaacgccaccagaacgtccagggaggaaatttccggctttccgagccgccctgccgtctgctgcgcctgcatcagcgcttcctgaaattttgttgttagattgttaagcatggtatgttggtaatttagacataagaatatctccaaccgttgaatgggaaagcaggatttttgccgttatccaaatttttttgaccctccgaattccttgtaatattgtagtgcatccggcgtattttacagaaccagcattttaccggccttttctttttttcctgtctccagttttttaccaaaatgatccgtctttcttttcttccgttcctatgctccgccctgctcctggttcaaacgggagcctccggcaaggagatgccttccccctatcccgctccggaacccggcgtccgcctgacaccgccggaatcgccggctcccgtgctgaacgaaccgcggcttttcggcgcacgtcccggctcccccatccagttcgccatctgcgccagcggagaacgccccatgagctttgccgccgccaaattgccccccggcgtgaagctggacagggaaaccggcgtcatcaccggtaaaatcagccgtccgggaacttatgcttttcccgtgcagataagcaacagccacggcaaagcgaacgggaccatcactgtccgcatcgggcaggagatgtgcctgactccccccatgggctggagcagctggtattcctacagcggcggcgtgagccaggaaaatatcctgaaaaccgcccggctgctcatcacttccgggctggcccaatacggctaccgctatgtcaacattgacgattgctggcaaggcgccagaggcggcaagtaccgcgccatccagcccaacaagcgttttccggatatgaagtccatgtgccgtgaaatccacagcctgggactgaaagcggggatttactcaaccccgtggatgggaacttacgccggctacatgggaggcacttcccccaatccgcagggagattattcctccctggcccttcctgaaagcaaacgcccgcagcccgatcaattgttcgggagctgtccgggttcccagcggctgggagccgccaaaacaggccccgtatggatgattacccaggatgccaggcagtgggcggaatgggggtttgattacgtcaagatggactggtacctgatcgacgtgcccagcacggaaagaatcgcggcggatttgaaaaaaagcggcagggacattgtgctgagcgtttccaattccaccccgttcgagattgccggccccatcagcaaaacggccaacgtctggcgcacgacgggagatatcgaagaccactggggcagtttgaagaagatcgcttcctcccaggagaaatggcagccctatgccggaccggggcactggaatgatccggacatgcttcaaatcggccgcctgggcaaggtcggaaaggcgaataccacattctcccccacccggctgactccggacgagcagtatttccagatgtccttctgggccataatatccgcccccctgattatttcatgcgatctggagcatctggacgatttcacgcggggcatcctgtgcaaccgggaagtgatcgccgtcaaccagacgtttcgcggcccttcggaaaaagtcctgtcccaagatgatggagaagtatggatcaaaccgctgggggaaggccgtaccgccgtcggctttttcaataaaagcaataaaggccagatcattcatgtccccctttcccgcctcaagctgaagtctccgcaaaacgcgcgcgacctgtggaagcaggaaaacgccggaacggcaagccgggaaatgaaggtgcggctcaatccccacggagcggccctgtttcttctggaaggcaaaagatagccccatggttctggaggagagttcctccctttcattcataaaatccgccccggcgaccggagaaagatgcggaaccaaggcaccggacaactgccggacgatttttccgccagggtattccccggaccgggacggtcaactatataccactaactggggggcaatgtatccagggcggcgttcagcgtcatcacgttgattacgttttcccccaggatgtcgcccggaatgaggtgttccgccaccaatcgccttactttttccagtggcagcttgcgggccgccgccacgcgggccgcctggaatcccgccgcttccggggaaatgcaggattccagaccgcttccggaagcgaacaggagatctgccggaacaggcgtttcctgcggcaggttgtgggctttcagcagggccgccttgcgctccgccaccgtcctgaccagttctccggaggtccaggagaggttgctggcaccggaaggcatggtggcgtagtccccggcggagggcctgggccagaagtacctggcggaagtgaagggctgggcgatgagctccgaggcgatgacttccccccgttcattccggatcagggagccgtgcgcctgatgggggaacagaatcaggctgacaagcgtgacagccaggggataaatgccgccggtgacgacggccagcgccagaaacaggcgcagattgggaaatgtccatttcataatgattcagcaggttgatttttaattgttcagacgaggtgcagggcggtgacggccatgtcgatgagcttgatgccgatgaacggcgcaatcaggccgcctaccccgtaaatgaggatgttgcgcttcagcagggaggctgctcccgccggtcggtaggaaacccccttcaaggccagtggaataagcgccacgataatgagggcgttgaagatcaccgcgctgaggatggcgctctgcggggagtgcagtcccatcacgttcagggcggaaagcgggccccgggccatgccgtcagccacaaagaggcccgcaaacatggcgggaatgatggcgaagtacttggccacgtcattggcgaaggagaaggtggtcagcgcgccgcgggtgatcagcatttgcttgccgatttccacgatttcaatcagcttggtcgggttgctgtccaggtctaccatgttgcccgcctcccgggcggcctgcgtgccggtgttcatcgccacgcccacatcggcctgggccagggcgggagcgtcgttggtgccgtccccggtcatggccaccagatggccttccgcctgttcttcacggatgcgcgccagcttcatttccggcgtggcttccgcaatgaagtcatccactccggcctccgccgcaatggatgcggcagtcagggcattgtcccctgtcaccatgacggtgcggatgcccatggcccggagccgggcgaagcgttccttaatgccgcccttgacgatgtctttcaggtaaatgacgcccagcacgtcccttccccgggccaccaccagcggcgtgccgccggcacgcgcgacgttctgcacggtcatttccacctcctgcgggaaggctccgccctggtccttcacccactgcgccacgctttccgcagcgcctttccggatggaaacggccggctggccgtcgtgcgccgcaatgtccacgccgctcatgcgggtggaagcggagaacggaacaaaggtgatgtggtccgcgtccatgtggcggccccggattccaaattgctttttggccagtactacgatgctgcgcccttccggcgtttcatcggacagggaggcgagctgggcggcttccgccagctgctggtcctccacgccgggcgcaggcaggaattcattcgccatgcggttgccgaaggtgatggttccggtcttgtccagcatcagcacatcaatgtccccggccgcttccacggcacggccggacgtagccagcacgttccggcgcaccagccggtcaatgccgctgatgccgatggcactcagcaggccgccgatcgtcgtcggaatcaggcacaccagcagggagaccagaacgggcagggagatatggccatccgccctgaagcccaacgcccgggcggaatcttcaatgtatccggccatggctgggagggaaagcactacggcaatgaagacgatggtcagcgccacgagcaggatgcccagcgcgatttcattgggcgtcttctgccggctggcgccctccaccatggcgatcatgcggtccaggaaggtattgcccggttccgccgtgatgcggatgacgatgccgtcgctgatcacgcgggtgccccccgttacggcgctgcggtctcccccgctttcacggatgaccggggcggattccccggtaatggcggattcgtccacgctggcgatgccttcaatcacctcgccgtcaagaggaatgatgtccccggcctcgcacagcactttttgccccttgcgcagctcggaaacggagactatttcctccgtccccttgtccgtcagcagacgggcgttcacatagacgcgcatttttttcagagcgtccgcctgggcctttccacggccttccgccaatgcttccgcaaagttggcgaacaggacggtgaaccagagccagagcgtgacttgcagggtaaagccgaaaggctgcccggcggcggcatcccggataaggacgaccgtggcaaccagggcaccgatggccgtgacgaatatcacgaagtttttggataaagcacgcgggtcaaatttgcgcagcgcgtcccggaaggccgttttcagcatggccccgttgcaccaggattgattctttttttcttctttcatcatcgtaaaatctggattgttggtgaatgctacttacagcatggttcccgaatacaggagcagatgctccagaatgggccccagggccagggccgggaagaaggtgagggcgcctacaatcagcaccacggccaccagcagaaccatgaacatcaggttgtccgtcgccatggtgccctgggccggaggcgcggttttcttggataccatgctgcccgcaatgatcatcaccggaatgatggctccgaagcgggccagcagcatcgccaggccgcccagcacggaatagaaaggcgtatcccccacagccaggccggcaaaggcgctgccgttgttcccggcctgggaaccgaagcagtacaggatttccgtcagcccgtggggtccggcattgcagatggattcacgccccacttccgtagcggcggccagtccgctcataagcaggacggttatgccgggcagcagaacgcccaccatggaccagcgcacttcccgcgcttcaatttttttgcccaggaattcgggagtacgccccaccatcagcccgcacaggaagacggtgatcatggcgaacatcagcatgccgtacaggccgcagcccagaccgccgaagatcacttcacccagcagcatgttgaacagggcaatgccgccgcccagcggggacatgctgcagtgcatgcagttcacggagccgttggaggaggccgtcgtagccacggaccagagggagctgttcgtcacgcccaggcgcacttccttgccttccagcatttccatgccggggaacagcgggttccccgtgtgttccgcccactgggaaagcccgatggtcgtcacaagcagaagcatcatggcgccgaagatgatccagccctgcctttttttcccgatcatcacgccgtaggcatacgggcaggcgcagccgatcaggagcagggagagcatttcaaccatgttgctgaacggcgtggggttttcaaaggggtgcgtgctgttgttcccgaagaagccgccgccgttcgtcccaagctgcttgatggccacctgggaggccgccggaccgttgggaatcacctgctccacgccgtccatgcccggtacggtggcgggtccgtcaaaggactgcaccaccccctgggagaccagcagaagcgcgacgaccacggaaatcggaatcagaaagtacaaggtactgcgcgtcaggtccgcccagaagttgcccagagtggaggcgcatttccttttcagaccgcggatcagggcggccatgacggcaatccccgtggcggcgctgacgaagttctgcacgcccagcccggtcatctggacaaagtagctgatgccttccggcccttcgccggagtagaactgccagttcgtgttggtcatgaagctgatggccgtattcagggcaatgtcccaccgcatgttttccgtgccggcgggattcagcggcagccatttctggcacagcagggaaaggaacaggatgaggaatccggcggcgttgaacagaagaacggccgtcagatactttttccagtccatttcgcgggaggggtccacgccggccacacggtaggtgcagcgctccacgggaccaagaaccggggaaagccagctccgctttccctgtaaaacattcgccagccacttcccgagcaacggagtgaaggcgaccagtatgcctatgaataggacaatgattaacaagtcgtgtgaggacataacgcaactttatacatgttccggaaattccgggtagttaacaaggggctgccggacattaagaaattgttaatttccctttggaagcccgtttttcatgacgccagtacgccgttagaattccacgcccaggcggaagcccacccagaactcgtccccggcgtccctgcggcgcagcaccgtagccgcctgggaataattgacggagccggaaagggaataatgttccgcaaaccgccacgtcacgcccaggctccagtcaatgcagttggagccgtcgtcatagtccacgttataaccgccgttgtatccgtacctggccatgggcgttaccgtcacgttctccacgggggaccattccagttgcacaaaggcgctgtaataggcttcaaaatcctggtgttccaccttcacctgggtttccgcccccacggtcagccagtccgtcacggcataggagacggtcagggccggattggctacgttgtagtcctgcgtgaaatagaactggtgctcataccagggattgacggtccacttccccagcttccaggcgtaacccagaaccaggtccagctcgtcataattggaggaatcccccccggcgtaccaggcgctgagcgtaaggtctttccaggagatgctcggagccacttcccagatgccgctgcccggcaggcagtccagcccttccgtcacgtatttgctggaccagcccgcggaaagggagaaagcccagtccgtgtccgtagaagggatggcggcctcctgcgcgttggccagggagggagaggagggagaggccgtttccccgcccatgcagacggttcctgccatcatggcgcagcccagaactgcggcccctatgtttcttgcggtgtatgtaatcttcataaagacgtatcgaatacgtcctaaatcctacacagcatattgaccttcgtgaagttaagccatgccctgcaaccgttatgaaaaaatatatttcccggcttccacgggtggaaggccacagcctttcccggcccgcggaaatgggaaaaagatttattcagctccgtccgccacaattctgtatcccaggccggattccgcgcggatgatgcggttttccggatcggaatcccccagcttctggcgcaggtgggcgatgtgcacccgcaggtagtgcgtatcttcctcatgctgggggccccagatttcacggagaagctggcggtgggtcatcaccttgccctgatggagcagcagaaggcgcagaatgccgtattccttggaggtcagatggatttcctccttccccttctccacgcgccgggagctcaggtccacaatgatggatcccagccggaatacggagggctccctgtccggccggttgcgccgcagcatcacgcgcaggcgcgccagcagttcccggccgctgaacggcttggtcaggtaatcgtccgccccggcgtccagggcgtccaccttctcatcctccctgtcccaggccgtcaggatcagaatgggaacctgcgtccattcccggagctgtttgagcacttccagtccgttgatgtccggaaggcccaggtccagaataatggcgtccggccgtttcagagcggtctcgctcaggccgagctgcccgttttcacactcgcggacatggtagcctgcgccggtcagcgtcaggttcaggagacggcgtatctgccgttcgtcatcaataaccaggatatctgcgggaaggtcgctcataacacggggaaggaaggtttattcttcaggaacatgatcatgctccaccaggggaaggacaagacggaaacaggttccggcgggaacggcaaccagggtaacggctccccgctgcgcctccatgaaaccgcgcacgatggaaagccccaggcccaggccgccgggccgcgtcgtccggaaacgctcaaaaatggtttccgcccgttcggggggaatgcccggccccaggtcatggacatccagccagacctggccgcgcacgggatcggcgccgcccttcagcgtcatgggggttcccgcaggagtatgcacgcaggcattcagcagcagattgaccagcacctgctccatcagggagaaatccgccttcaccagcggataatccggcggcagggcgacagacacgggatggtcccggcgcgcctccctggtggcggccagagccccttcaatcacatcccccaggtcgcaccagtccagtttgggcttcagggcgccggattccaggcggctcacgtccagcaaatttttcaccaggcggcgcaggcggcgtgcggccagcaggatttccccatactcctcccgttcctccggcgcggacgcggcgcgcccggccagcttctcacagccgccctcaatcacggccagaggcgtcttgaactcatgggaaacgctgtccagcagggagcggtgcagtttttcggattcctccatgagccgcgtacgcgcccgttccgcccgcagctcttcacgttccagcgccatggccagctgcgcgcccatgctttccagcaaatccttctgccctgccgtaaggcgctccccttcctccggcctcacgcccagcacgcccatgcagcgttccccggacatcatggggaggtaaaacccttccgccaccgggagcgtatccgtaaacctgcctgcgggccggcggtgctccaggcaccaggcagccacgctccattccttgtcatccatggaaaaagcccccccggattcccaaagcttcagcctgcggccgctgccttccggcgtcatgaccgccaggcgcacccccataatctggctgatctgccctgcggcgacggaaatcagggaaggcacgtccgaggcggacccaatggcccgcgaatacaggaacagggcattcgtctttttttcccgttcccgctcctcctgctcgcggaccctcaggcgggaagtgagccgccccgtggagagagccaccagaaagaagaaaaggcacatcagggcatcctccagccgttctatcttgaatgtcatcaccgggggaatgaacagcaggttccacagcagggcgctcagcgcagcggccatcagcatggcccagcgggaacggatgaaaaagcccaggcccactactcccgccagatacaggaagccgggagcgaaataaccggtaaacgcggaaatcaacaggccgattcccgtaacggccgccgtcacgcctgcggccagccagtagtcccggccatatttttccgtttcccggtgccagctcttccaccggttccggaccggaccgggagcggcgggaactacgtaaatgtcaatctggtcgctcccctttaccagtttgtccaccagggacatgggccgcaccagcccccacaggtaagcctcctgcggcttgcccaccacaatctggctgacatttctcaaaaaggccatgcggagcagcgtctccgccaggtcggaaccgggcatcacgatcacttccgcacccagccgccgcgccagctccaggttggcgtccagccgctgctgctgttcgggggacagcggcacgcccgtatccacggaaagggcaatccacggagcgttcagggcgtaagccatgcgccgcgtccagcgcaccagccgggcggaaaacgggctgggccccacggctaccatcagccgttccccgctgcgccagatggagcggtccccggagatggtgcgcacctccgtcagctcatggtccaccttctccgccatgatgcgcagggccagttcccggagggccgtaaggttggactccttgaaaaaatggtccagcgcggcggaagcctggggagcgctgtataccttcccttcctgaagacgcgtccgcaactgctccggcgtgatgtccaccaactggatgcagtccgcctccgccagcacggaatccggcacggtttcctgtacgggagcggcggtaatgtcatgaacggtatcggaacggctttccagatgctgcacgttcagcgtggtgtaaacgtctatccctgcggccagcaaatcctccacatcctggtagcgcttcctgtgacgcattccgggaacgttcgtatgcgccagctcgtccaccagaatgagctggggcttcacgcgcagcgcctcctccaggtcgaactcctccatctgcacgccccggtaagccattttcttcatgggaaggcgcggcagcctgccgataaggcgcatcgtatcctcccggccatgggattccgccacgccgatcatgacctgcacgcccttgcccgccgcctggatggcggcctccagcatggcgtacgtcttgcccactcccggcgccatgccgaagaagattttcagcaggccgcggccggggcgggattcctccctccggatggaggccagaatcctgtctgcccgctggctgtccgaatgcgtttctgaaaacatgaaaaaagggaaccgtaatggtatccggcttgaatgttagaattaacctaatggaagaccgttcagggtgcaaataaaacagaccagaaaaaacgttaaaattttattaaattccaccccccttccccatttttgtttccattctttcttcttttcgttatcaagcatttttaaatttccccctttccttttcacaatgaacgctttccagaccattcgccgcaccgtctcctcctccgcagtcctgtttctcctgctcctgggaaccgccctggcgcggggagcggaggaagccgcttctgaaaacttcgactcctttccgacgggtagcttcacctccctggaaaccgctctggggaccatgacggcggaaagcgggcatgccgccatcgccagcaaccgctgttcctcccagcccaactgcatgcggctcatcggcctgggcgccgggacgaaaagcacggccacgctgatgctgcccgctcccctcgccgtcaaaaagacgcttgccctgaccggggaacgctggacgtccgacagccccttttccttcaccatccacgccgcggacggggaagggaatgaaacactggtcgcggacggctcctccctgaaaacgggcagcaatcccatgacccagcaggtgaggggcgccatcccttccggcaccgcgcgcctcatcttccgctgcgaggcccccgccaataagggcgttcttttcgacgatctggtcttttccgaattcaaccccctctccagcaccgcggaagcatggccagccatgatccgcatggaggccaacggcatcctccgcttttccctgacggaactccccgctgcgtatgacggcatagccgtcacggtggacatgagcccgtccgacgacctgggtgacattgaaagcgtttccctttacaccggtgacgcggacggcatctattccgcgcccgcctacggcagcagcggccacggcgccatgagcaccacgggcgtccttgccagcccggcccagccgccggctcccgtcatgacattccccgtcactccgggggttctcacgaacggacggcaatactacttctgggtcagcgtcaagctcaagaactccgccagcatggaccacaaggtgggcgccagaatcacctccgtcaccgtggacgggcaaacgactgatgttgccgatggagtgacggccaggcagcggataggctatgccgtcgccaaggcgaacgatccggtttatggaggccccttggaaggaaaggcctccaggaaattccgcattccgggcatcgtgcgcgccaggaacggggatctggtctccgttttcgacatccgctacgacggccggaacgacatgcaggccaacatcgatacgggatgcagccgttccacggacaacggacgcacctggacgcccgtcaacgtggccgtcaacttcaaccccacgggcgattccgccaacgactaccattccggctacggcgtcagcgacccctgcatccttctggatgaagtcaacggtaccctgtgggtggcaggcatcgccaggcacgggctggcctcctccaaggccaacgtggacgtggaaagcctggaaaccgcccagtatgtggtagcgtacagcacggacaacggccggacatggggttccgcggaccccggcacgggggagttcgtaaaaatgaaaccccggagcatcaacaaggacatcaagaacagggcctggaaatcctttttccagggtccgggccacggcattacgatgaagaagacggtcaatggcgtgcgccccattgtctttccttcccagatatggacgggcgccagcggcgcgggaactccccagtcctgcatcatttattctctggaccgcggccagacctggatcagcgaggacatcggcaaatccggcacgcccggcatcggagccggctccagcgaatgcgcagtcacggagctcagcgacgggcgcctgatgctcaatgcccgcaatgaaagcaggagcgggtaccgtaaggtcttcacgacggacgacatggggaagacgtggacggctcatgccaccaacctgaaagccctgccggagcccgccgcctgccaggccagccagctcgccgtggaaaactccgcgaacatcagcagggccctccttttctccaaccctgataaaacttccgccccccgcgcccgaatgaccctcaaagcctcctttgacgaaggcgccacatggccctccagccgccaggttctttacgattcccgcccctgctgcggctattccgacatctgtgaaacgggagacggccacatcggcgtgctgtatgaagggctcaacggggacgaaaatatcttcttcctgcgcattccgtatgatgaattccttccttccctggacgttcccgccgccggggcgcccgtccgcgtgggaccggaaggcgtgacggcagccacgttcaccgtctccagcgacgattcctggacggcgtcctcttccgctggctggatcaccgtctctccctcttccggctccggaaacggctccgtcacctacagcgtggaccgctgggaaggcgcgggcgaacgcaccggaaccatcacggttgccgttcctggcgtccagccggtctccgtcactgtcatccagtccggcagggcccctgcgctggcggtttcccccgctgcgctggtgcttcccaaaaacgggggaacggcggtcttctccgtcacctgcgacgccgcctggaatgtctccaaaacggcggactggataaacatcaccggcatgcagggagcggaaacgggcaatggaaccgtatccattgccgcagaggccaatgccgcggaaggctcccgtacggcgcagctttccttttcctcctttggaaccgtccgctccgccaccgtgactcagcgggggcagaaacgcacgtggaatgaatggaaggaggatgaaatcacctcccgggacccggacacggaccagacaggccccaatgattccccggccggggacggcatccccaacctgttgaaatacgccacaggattggatcccctcaaaccctgcggtagcgtcgtgcaggtcaccgcggaggaagcgggcggagacgcctgcctggtactgggctggcccgtcaacccggaagccaccggaatcaggcacgcagtggaagcctcggaagacctccagacctggacggagacggcggaagtggaaacggaaggcaaaagctccgccactttccgggatgccgtgcccatgaacgcggaaagtccccggcgaagattcctgcgcctgaaaatttcccgtgaaggggaaagcccgctttaagggcaaaacaagcacgcggcaccgggaatcttccggcaagggaaaaaaagcctttttccctcagcccatccttttccgatattggagaaggaaccagatgccatgccgccattttttccggatgaactgcactccgcactaaaagcggaaaatgccggaaacgcacttgaacccggtaaatttcactcttgccgtgtccgcggccaaccgcaggaatccccttgtttttctgcgttcgcaaaagaccgtctaacaaataaaattaaaaaatcggaacgttttttcctttcttaattgacaaaccatgccctttcctcttaatgatttaatgtttatgaatccggtatattgtctgccagcggccctcttcacatgcgtgttgttgtcggcaacagccgcctccctgcatgcggaaacagcgtacagcacgccctgcggctacatccagacggatctgaatgccaaaacaacgggctatctgggcctgggagtgcatccggaagccctgatgcagcatacgcttgaggaaaacaacatcaccgtttccggcagcaaaatcaccatcacggacccggacgtcaattttaccgacctgatggagacggattccgcctatgttctggaactcattttcggagacgaggcgatggcccttcccctcaacagggacgcgtggaaaaagcccgccccttcctggacggcgaataaaataacggtggatgacaaaagcgcagcggacctgattaaaaacagcaagccggtttcctacgtgctgcgcaaggcgcgcaccctgaacgatgttctgggaggcgacaatacgttcagcctgaaaagcggcacttccggcactgcggatgccgtttatatctccacctccccctccatccagattccggtttaccactccgctacggaaaacaaatggatgcgccgcggttcccgggacgacatgggccttctccccgtcttcaatcatgaaccccttaaaatcgtccggaaagccggcaatggcgtgcaggccttcgttatcggggaagtggcgcagaagcaccagaggctccagctctcccaggaaagcacgctccttcatacggggctgcctgttccccagacgcttctcagcacctccctccacaccgccctgcccgatccttccagtgacgtggtttacgtgcctctcacacccggcggccctctggagccctgttattatgattcttcctccggacagtggaaaaacagggacacgggtgaaaacgtatcctccacggcggtggaaggcatcctgaacatcctttccggcaccaggcttcccgcttacacaactgtccagaccaatacattacctactcctcaataacaacttaacaagtagtgataccatgatgaaacattccttcctgctgtacgcagccgccggactgatgatcgcgggagcagcctctgccactacgctcaccgtttacaatgaagacgaatatgggactgcccctattacgcccattcttgacgcctccggccattccctgcaaaacggctccgccatgctcggataccttcaagacagtacctggtctttcgacctggttgacggcaaaattgaatggtccaaaaacagcacgcccgcaggccagttgagctacagccaaatggcggaaatcaggcaaagcttcaccaccagcctttccgccgtttctccggaatatcccggcgccactaccaatggcggccagttttcactttccggcacgctggcctccggtctggaaggaaagcccattgtcctcctgatcaacaacgacgattctcccggcgaattctccatgtttacgttccggaacgtggatacgggcgaactggccaaatacccgggagtggtggggaacgacatgacgtttttcttcgggtcgcaggcggatgccattaccgagggttatgagtggtatgccatccctctctttaacgacaacttcaatctggttcccgaacccgccaccgctacgctgagcctcctcggcctggcgacgctgatgatgcgcagacggcgctaaaagagcttttcccactgttaaagcctccgcacgggaatgcctgtgcggaggcttttttgcaggcagacggcagccgcactccaggccctccttcatcacatcccgccgccggaggagcgccgcgagcctctgcggcaaccgattcatcatgcggctggcagccgcactggttttcagaaaatgcgcccgctggcgcccaggttcatctttagttggcgcaagggcttgcggcgctccaaccaggttccaaacggcattgcggcaaataaaacgccccgcgcactccgaagagcggcggggcgtctgttcaagcggtggaaaccgcaggagttactttttaacgggaatgatatccagctccgctacggcggcgtaatcccggccctgcgtttcactgagggcggagaagcggaaatagcgcgccttgacgggcgcctggaacttcacttcctgaagatccgcgctgtccgggaaggcgcccttggcggcaggctgccatttttcaccgtccgtgctcacttccacggaataatccttcacgcggccgttaccgcttccgtcctggcggggcaggtaggtaatgccggagaactcccgctccttgcccaggtccacggccagcacgtgcgggtgcttggtcacggtcttgttgtactcggagtgccagaaggtgccggggtccccgtcaatggcgaactcggcgtccgcctcgccctgctcctggctggtcacgctcttgaccgtgtatttgtccgtacgggtcagcatggtcatgtccagctgggccgcgggcacgcggatttcacccttgtaggacttggaggtgacgggacgcatgaagaaggacagcgggtagggcttgttggccttgatgatgtccctgctcatggggccggggccgcaggaggcgccccccaggccgcgcgtggcggaggagaggaccagcacggttttgtccgtcgtcttgggcagctccacggggtggttggccagaatcaggtccgtcgtggtgtagggaatggctgagaaggcaaacggagcgcccacggaaccgaagagcaggccctgccccttgtcatctgtgacggccacccagcgggtgtcttcatggttgccgcagtcctgcggcctgccgtacgggaagaaggaatcccgggccgtcgtcttgtacacgcccagaggcatgccgctcttgcggtccgcatagttttcctccggcccgcggccgtagtaggtcacgttgcccatgttcgccggcaactggagttcataccccaggcgcagcagctccaggggattgccgcgcggcagcagcacggactggcagacgacggttccatccgggtagatagtccattccagattgttgatgaaatgggtgttcgtgtcattcaggggctgctttttgggcgtgatggaggtcttggtgtctccatagccgctgatgttttcagcctgcttgccgcttaccttgacggactgcttgacggtgacgctgctgccgttgtccacggcttcataactgagcagttcatgcttcagctcacggaggccgttggccatgctcttggccatgacgcccggctcattgctggaagcggcgcgcagggcgttcaccgccatgggcgtcttgaacaggggcttgccgttcacggtgaactgggccagttccccggtggccgcgtcaaactgaacggagaaatccttgccggacacggtgtgcttgtccgcgctgagggttaccttgccggcaggagccttgaacatgggcaggtctccctgcacgggaagttggagctggtcaaaggccagttcatagcccttcttggcccagtccttgtccttcttcagcttgtagcctatgcgcagggcgtattccgctcccggcttacggtttttcagctgcggaatgtccggtacgggcaccacgatcttttcccggggtccggccggcggcgtatccagcttgccttccgccaccacattcccgttctccgtcagagtccaggtgatgtcgtacggagacaggtccgtaaagaagttcttgttgaagatggaaatcctgccgtcgtccgtcagggacgtggagatattctgataaacgtgcttcacttcaaagtagcccggttccggcgtgcggtccgccaggatggtgccgttgaatacgaactggccgctgttgggatggtcgttgaagtcgccgccgtaggcgagcatcctctccccgttcggcagggtcttgtacaggccctggtccacccagtcccagatggcgccgcccatgatgcggtcggaagattcaatagcctcccagtagtccgccaggttgcccatggcgttcatcatgttgtgcgcgtactctgaaatgtagtagggcttcgggaagttcttgttggccgccatggagcgcgtccagtccacggaggggtactggttggaacccaggtccacgatgtcgttgttgcgctcatagtgggtggggcgggacatgtccctggccttcacgatcttttccgcgctgcggaaattctggccgggccctgcctcattccccagggaccacatgatcacgctggggtggttcttgttgcgctccaccatcgccatgatgcggtccacgtgggccggcatccattcgatggggtgggaaagggactccttgccgtaatagtagccgtgggactcgatgttggcctcatcctgcacgtaaatgccgtacttgtcgcagaggtagtagaaataggggtccgcgggataatgggagcagcgcacatggttgatattggcgcgtttcatcatctgcacttcctcctccatctgttccggagtcacgtagtgcccggtttccgggtggctttcatggcggttcacgcccttcaccttgaccggctggccgttcaccaggaacacgctgtccttaatcaccacgttgcggaagcccacgcgggaggaaaccatctcctccgtcttgccgtc
